(19) United States
(12) Patent Application Publication
(10) Pub. No.: US 2023/0034093 A1
(43) Pub. Date: Feb. 2, 2023

(54) Treatment Of Cognitive Impairment With Alpha-N-Acetylgalactosaminide Alpha-2,6-Sialyltransferase 5 (ST6GALNAC5) Inhibitors

(71) Applicant: Regeneron Pharmaceuticals, Inc., Tarrytown, NY (US)

(72) Inventors: Jonathan Marchini, Tarrytown, NY (US); Manuel Allen Revez Ferreira, Tarrytown, NY (US); Giovanni Coppola, Tarrytown, NY (US); Goncalo Abecasis, Tarrytown, NY (US); Aris Baras, Tarrytown, NY (US)

(21) Appl. No.: 17/854,759

(22) Filed: Jun. 30, 2022

Related U.S. Application Data
(60) Provisional application No. 63/217,937, filed on Jul. 2, 2021.

(51) Int. Cl. C12Q 1/6827; A61K 31/7105; C12N 15/113; C12N 9/22; C07K 14/47; C12Q 1/6883

(52) U.S. Cl. CPC C12Q 1/6827; A61K 31/7105; C12N 15/113; C12N 9/22; C07K 14/4703; C12Q 1/6883; C12N 2310/14; C12Q 2600/156

(57) ABSTRACT

The present disclosure provides methods of treating subjects having cognitive impairment or at risk of developing cognitive impairment, and methods of identifying subjects having an increased risk of developing cognitive impairment.

### REFERENCE TO SEQUENCE LISTING

[0001] This application includes a Sequence Listing submitted electronically as a text file named 18923808001SEQ, created on Jun. 25, 2022, with a size of 634 kilobytes. The Sequence Listing is incorporated herein by reference.

### FIELD

[0002] The present disclosure relates generally to the treatment of subjects having cognitive impairment with Alpha-N-Acetylgalactosaminide Alpha-2,6-Sialyltransferase 5 (ST6GALNAC5) inhibitors, and methods of identifying subjects having an increased risk of developing cognitive impairment.

### BACKGROUND

[0003] Cognitive impairment can be characterized by an individual's difficulty in remembering, learning new things, concentrating, or making decisions that affect their everyday life. Cognitive impairment ranges from mild to severe. With mild impairment, individuals may begin to notice changes in cognitive functions, but still be able to do their everyday activities. Severe levels of impairment can lead to losing the ability to understand the meaning or importance of something and the ability to talk or write, resulting in the inability to live independently. Cognitive impairment includes, but is not limited to, decreased myelin integrity, neurodegeneration, decreased grey/white matter contrast (GWC), and conversion of mild cognitive impairment to dementia.

[0004] GWC can be used across a diffuse set of brain regions to assess cognitive impairment. GWC is a measure of blurring between the boundaries of grey/white matter brain compartments and is thought to be an indicator of local variations in tissue integrity and myelin degradation, increasing water content in the white matter, or iron deposition (Uribe et al., Front. Aging Neurosci., 2018, 10, 89). Lower GWC is associated with aging and lower indices of cognition (Lewis et al., Neuroimage., 2018, 173, 341-350), as well as an increased rate of conversion from mild cognitive impairment to dementia (Jefferson et al., Brain Imaging Behav., 2015, 9, 141-8).

[0005] Alpha-N-Acetylgalactosaminide Alpha-2,6-Sialyltransferase 5 (ST6GALNAC5) is a gene that catalyzes the biosynthesis of ganglioside GD1alpha from GM1b in the brain (Okajima et al., J. Biol. Chem., 1999, 274, 30557-30562). The ST6GALNAC5 gene was previously identified as one of the genes that mediate breast cancer metastasis to the brain.

### SUMMARY

[0006] The present disclosure provides methods of treating a subject having cognitive impairment or at risk of developing cognitive impairment, the methods comprising administering an ST6GALNAC5 inhibitor to the subject.

[0007] The present disclosure also provides methods of treating a subject having decreased myelin integrity or at risk of developing decreased myelin integrity, the methods comprising administering an ST6GALNAC5 inhibitor to the subject.

[0008] The present disclosure also provides methods of treating a subject having neurodegeneration or at risk of developing neurodegeneration, the methods comprising administering an ST6GALNAC5 inhibitor to the subject.

[0009] The present disclosure also provides methods of treating a subject having decreased grey/white matter contrast (GWC) or at risk of developing decreased GWC, the methods comprising administering an ST6GALNAC5 inhibitor to the subject.

[0010] The present disclosure also provides methods of treating a subject undergoing conversion from mild cognitive impairment to dementia or at risk of conversion from mild cognitive impairment to dementia, the methods comprising administering an ST6GALNAC5 inhibitor to the subject.

[0011] The present disclosure also provides methods of treating a subject with a therapeutic agent that treats or inhibits cognitive impairment, wherein the subject has cognitive impairment or is at risk of developing cognitive impairment, the methods comprising the steps of: determining whether the subject has an ST6GALNAC5 missense variant nucleic acid molecule encoding an ST6GALNAC5 predicted loss-of-function polypeptide by: obtaining or having obtained a biological sample from the subject; and performing or having performed a sequence analysis on the biological sample to determine if the subject has a genotype comprising the ST6GALNAC5 missense variant nucleic acid molecule encoding the ST6GALNAC5 predicted loss-of-function polypeptide; and i) administering or continuing to administer the therapeutic agent that treats or inhibits cognitive impairment in a standard dosage amount to a subject that is ST6GALNAC5 reference, and/or administering an ST6GALNAC5 inhibitor to the subject; or ii) administering or continuing to administer the therapeutic agent that treats or inhibits cognitive impairment in an amount that is the same as or less than the standard dosage amount to a subject that is heterozygous for the ST6GALNAC5 missense variant nucleic acid molecule encoding the ST6GALNAC5 predicted loss-of-function polypeptide, and/or administering an ST6GALNAC5 inhibitor to the subject; wherein the presence of a genotype having the ST6GALNAC5 missense variant nucleic acid molecule encoding the ST6GALNAC5 predicted loss-of-function polypeptide indicates the subject has a decreased risk of developing cognitive impairment.

[0012] The present disclosure also provides methods of identifying a subject having an increased risk of developing cognitive impairment, the methods comprising: determining or having determined the presence or absence of an ST6GALNAC5 missense variant nucleic acid molecule encoding an ST6GALNAC5 predicted loss-of-function polypeptide in a biological sample obtained from the subject; wherein the subject has an increased risk of developing cognitive impairment when the subject is ST6GALNAC5 reference, and the subject has a decreased risk of developing cognitive impairment when the subject is heterozygous or homozygous for the ST6GALNAC5 missense variant nucleic acid molecule encoding an ST6GALNAC5 predicted loss-of-function polypeptide.

[0013] The present disclosure also provides methods of detecting an ST6GALNAC5 missense variant nucleic acid molecule, or the complement thereof, encoding an ST6GALNAC5 predicted loss-of-function polypeptide in a subject, the methods comprising assaying a biological sample obtained from the subject to determine whether a nucleic acid molecule in the biological sample is: i) a genomic nucleic acid molecule having a nucleotide sequence comprising a cytosine at a position corresponding to position 176,867 according to SEQ ID NO:2, or the complement thereof; ii) an mRNA molecule having a nucleotide sequence comprising: a cytosine at a position corresponding to position 600 according to SEQ ID NO:11, or the complement thereof; a cytosine at a position corresponding to position 639 according to SEQ ID NO:12, or the complement thereof; a cytosine at a position corresponding to position 562 according to SEQ ID NO:13, or the complement thereof; a cytosine at a position corresponding to position 515 according to SEQ ID NO:14, or the complement thereof; a cytosine at a position corresponding to position 579 according to SEQ ID NO:15, or the complement thereof; a cytosine at a position corresponding to position 416 according to SEQ ID NO:16, or the complement thereof; a cytosine at a position corresponding to position 639 according to SEQ ID NO:17, or the complement thereof; or a cytosine at a position corresponding to position 600 according to SEQ ID NO:18, or the complement thereof; or iii) a cDNA molecule produced from an mRNA molecule in the biological sample, wherein the cDNA molecule has a nucleotide sequence comprising: a cytosine at a position corresponding to position 600 according to SEQ ID NO:27, or the complement thereof; a cytosine at a position corresponding to position 639 according to SEQ ID NO:28, or the complement thereof; a cytosine at a position corresponding to position 562 according to SEQ ID NO:29, or the complement thereof; a cytosine at a position corresponding to position 515 according to SEQ ID NO:30, or the complement thereof; a cytosine at a position corresponding to position 579 according to SEQ ID NO:31, or the complement thereof; a cytosine at a position corresponding to position 416 according to SEQ ID NO:32, or the complement thereof; a cytosine at a position corresponding to position 639 according to SEQ ID NO:33, or the complement thereof; or a cytosine at a position corresponding to position 600 according to SEQ ID NO:34, or the complement thereof.

[0014] The present disclosure also provides therapeutic agents that treat, inhibit, or prevent cognitive impairment for use in the treatment or prevention of cognitive impairment (or for use in the preparation of a medicament for treating cognitive impairment) in a subject identified as having: i) a genomic nucleic acid molecule encoding an ST6GALNAC5 predicted loss-of-function polypeptide, or the complement thereof, wherein the genomic nucleic acid molecule has a nucleotide sequence comprising: a cytosine at a position corresponding to position 176,867 according to SEQ ID NO:2, or the complement thereof; ii) an mRNA molecule having a nucleotide sequence encoding an ST6GALNAC5 predicted loss-of-function polypeptide, wherein the nucleotide sequence comprises: a cytosine at a position corresponding to position 600 according to SEQ ID NO:11, or the complement thereof; a cytosine at a position corresponding to position 639 according to SEQ ID NO:12, or the complement thereof; a cytosine at a position corresponding to position 562 according to SEQ ID NO:13, or the complement thereof; a cytosine at a position corresponding to position 515 according to SEQ ID NO:14, or the complement thereof; a cytosine at a position corresponding to position 579 according to SEQ ID NO:15, or the complement thereof; a cytosine at a position corresponding to position 416 according to SEQ ID NO:16, or the complement thereof; a cytosine at a position corresponding to position 639 according to SEQ ID NO:17, or the complement thereof; or a cytosine at a position corresponding to position 600 according to SEQ ID NO:18, or the complement thereof; or iii) a cDNA molecule having a nucleotide sequence encoding an ST6GALNAC5 predicted loss-of-function polypeptide, wherein the nucleotide sequence comprises: a cytosine at a position corresponding to position 600 according to SEQ ID NO:27, or the complement thereof; a cytosine at a position corresponding to position 639 according to SEQ ID NO:28, or the complement thereof; a cytosine at a position corresponding to position 562 according to SEQ ID NO:29, or the complement thereof; a cytosine at a position corresponding to position 515 according to SEQ ID NO:30, or the complement thereof; a cytosine at a position corresponding to position 579 according to SEQ ID NO:31, or the complement thereof; a cytosine at a position corresponding to position 416 according to SEQ ID NO:32, or the complement thereof; a cytosine at a position corresponding to position 639 according to SEQ ID NO:33, or the complement thereof; or a cytosine at a position corresponding to position 600 according to SEQ ID NO:34, or the complement thereof.

[0015] The present disclosure also provides ST6GALNAC5 inhibitors for use in the treatment or prevention of cognitive impairment (or for use in the preparation of a medicament for treating or preventing cognitive impairment) in a subject that: a) is reference for an ST6GALNAC5 genomic nucleic acid molecule, an ST6GALNAC5 mRNA molecule, or an ST6GALNAC5 cDNA molecule; or b) is heterozygous for: i) a genomic nucleic acid molecule encoding an ST6GALNAC5 predicted loss-of-function polypeptide, or the complement thereof, wherein the genomic nucleic acid molecule has a nucleotide sequence comprising: a cytosine at a position corresponding to position 176,867 according to SEQ ID NO:2, or the complement thereof; ii) an mRNA molecule encoding an ST6GALNAC5 predicted loss-of-function polypeptide, or the complement thereof, wherein the mRNA molecule has a nucleotide sequence comprising: a cytosine at a position corresponding to position 600 according to SEQ ID NO:11, or the complement thereof; a cytosine at a position corresponding to position 639 according to SEQ ID NO:12, or the complement thereof; a cytosine at a position corresponding to position 562 according to SEQ ID NO:13, or the complement thereof; a cytosine at a position corresponding to position 515 according to SEQ ID NO:14, or the complement thereof; a cytosine at a position corresponding to position 579 according to SEQ ID NO:15, or the complement thereof; a cytosine at a position corresponding to position 416 according to SEQ ID NO:16, or the complement thereof; a cytosine at a position corresponding to position 639 according to SEQ ID NO:17, or the complement thereof; or a cytosine at a position corresponding to position 600 according to SEQ ID NO:18, or the complement thereof; or iii) a cDNA molecule encoding an ST6GALNAC5 predicted loss-of-function polypeptide, or the complement thereof, wherein the cDNA molecule has a nucleotide sequence comprising: a cytosine at a position corresponding to position 600 according to SEQ ID NO:27, or the complement thereof; a cytosine at a position corresponding to position 639 according to SEQ ID NO:28, or the complement thereof; a cytosine at a position corresponding to position 562 according to SEQ ID NO:29, or the complement thereof; a cytosine at a position corresponding to position 515 according to SEQ ID NO:30, or the complement thereof; a cytosine at a position corresponding to position 579 according to SEQ ID NO:31, or the complement thereof; a cytosine at a position corresponding to position 416 according to SEQ ID NO:32, or the complement thereof; a cytosine at a position corresponding to position 639 according to SEQ ID NO:33, or the complement thereof; or a cytosine at a position corresponding to position 600 according to SEQ ID NO:34, or the complement thereof.

### DESCRIPTION

[0016] Various terms relating to aspects of the present disclosure are used throughout the specification and claims. Such terms are to be given their ordinary meaning in the art, unless otherwise indicated. Other specifically defined terms are to be construed in a manner consistent with the definitions provided herein.

[0017] Unless otherwise expressly stated, it is in no way intended that any method or aspect set forth herein be construed as requiring that its steps be performed in a specific order. Accordingly, where a method claim does not specifically state in the claims or descriptions that the steps are to be limited to a specific order, it is in no way intended that an order be inferred, in any respect. This holds for any possible non-expressed basis for interpretation, including matters of logic with respect to arrangement of steps or operational flow, plain meaning derived from grammatical organization or punctuation, or the number or type of aspects described in the specification.

[0018] As used herein, the singular forms “a,” “an” and “the” include plural referents unless the context clearly dictates otherwise.

[0019] As used herein, the term “about” means that the recited numerical value is approximate and small variations would not significantly affect the practice of the disclosed embodiments. Where a numerical value is used, unless indicated otherwise by the context, the term “about” means the numerical value can vary by ±10% and remain within the scope of the disclosed embodiments.

[0020] As used herein, the term “comprising” may be replaced with “consisting” or “consisting essentially of” in particular embodiments as desired.

[0021] As used herein, the term “isolated”, in regard to a nucleic acid molecule or a polypeptide, means that the nucleic acid molecule or polypeptide is in a condition other than its native environment, such as apart from blood and/or animal tissue. In some embodiments, an isolated nucleic acid molecule or polypeptide is substantially free of other nucleic acid molecules or other polypeptides, particularly other nucleic acid molecules or polypeptides of animal origin. In some embodiments, the nucleic acid molecule or polypeptide can be in a highly purified form, i.e., greater than 95% pure or greater than 99% pure. When used in this context, the term “isolated” does not exclude the presence of the same nucleic acid molecule or polypeptide in alternative physical forms, such as dimers or alternatively phosphorylated or derivatized forms.

[0022] As used herein, the terms “nucleic acid”, “nucleic acid molecule”, “nucleic acid sequence”, “polynucleotide”, or “oligonucleotide” can comprise a polymeric form of nucleotides of any length, can comprise DNA and/or RNA, and can be single-stranded, double-stranded, or multiple stranded. One strand of a nucleic acid also refers to its complement.

[0023] As used herein, the term “subject” includes any animal, including mammals. Mammals include, but are not limited to, farm animals (such as, for example, horse, cow, pig), companion animals (such as, for example, dog, cat), laboratory animals (such as, for example, mouse, rat, rabbits), and non-human primates (such as, for example, apes and monkeys). In some embodiments, the subject is a human. In some embodiments, the subject is a patient under the care of a physician.

[0024] A rare loss-of-function variant in the ST6GALNAC5 gene associated with a decreased risk of developing cognitive impairment in humans has been identified in accordance with the present disclosure. For example, a genetic alteration that changes the thymine at position 176,867 in the ST6GALNAC5 reference genomic nucleic acid molecule (see, SEQ ID NO:1) to a cytosine has been observed to indicate that the subject having such an alteration may have a decreased risk of developing cognitive impairment. It is believed that no variants of the ST6GALNAC5 gene or protein have any known association with cognitive impairment. Altogether, the genetic analyses described herein surprisingly indicate that the ST6GALNAC5 gene and, in particular, a variant in the ST6GALNAC5 gene, associates with a decreased risk of developing cognitive impairment. Therefore, subjects that are ST6GALNAC5 reference that have an increased risk of developing cognitive impairment, such as decreased myelin integrity, neurodegeneration, decreased GWC, and conversion of mild cognitive impairment to dementia, may be treated such that the cognitive impairment is prevented, the symptoms thereof are reduced, and/or development of symptoms is repressed. Accordingly, the present disclosure provides methods of leveraging the identification of such variants in subjects to identify or stratify risk in such subjects of developing cognitive impairment, such as decreased myelin integrity, neurodegeneration, decreased GWC, and conversion of mild cognitive impairment to dementia, or to diagnose subjects as having an increased risk of developing cognitive impairment, such as decreased myelin integrity, neurodegeneration, decreased GWC, and conversion of mild cognitive impairment to dementia, such that subjects at risk or subjects with active disease may be treated accordingly.

[0025] For purposes of the present disclosure, any particular subject can be categorized as having one of three ST6GALNAC5 genotypes: i) ST6GALNAC5 reference; ii) heterozygous for an ST6GALNAC5 missense variant nucleic acid molecule encoding an ST6GALNAC5 predicted loss-of-function polypeptide; or iii) homozygous for an ST6GALNAC5 missense variant nucleic acid molecule encoding an ST6GALNAC5 predicted loss-of-function polypeptide. A subject is ST6GALNAC5 reference when the subject does not have a copy of an ST6GALNAC5 missense variant nucleic acid molecule encoding an ST6GALNAC5 predicted loss-of-function polypeptide. A subject is heterozygous for an ST6GALNAC5 missense variant nucleic acid molecule encoding an ST6GALNAC5 predicted loss-of-function polypeptide when the subject has a single copy of an ST6GALNAC5 missense variant nucleic acid molecule encoding an ST6GALNAC5 predicted loss-of-function polypeptide. As used herein, an ST6GALNAC5 missense variant nucleic acid molecule is any ST6GALNAC5 nucleic acid molecule (such as, a genomic nucleic acid molecule, an mRNA molecule, or a cDNA molecule) encoding an ST6GALNAC5 polypeptide having a partial loss-of-function, a complete loss-of-function, a predicted partial loss-of-function, or a predicted complete loss-of-function. A subject who has an ST6GALNAC5 missense variant nucleic acid molecule encoding an ST6GALNAC5 predicted loss-of-function polypeptide having a partial loss-of-function (or predicted partial loss-of-function) is hypomorphic for ST6GALNAC5. The ST6GALNAC5 missense variant nucleic acid molecule encoding an ST6GALNAC5 predicted loss-of-function polypeptide can be any nucleic acid molecule encoding an ST6GALNAC5 Val135Ala, Val45Ala, Val45A1a*, or Val135A1a* polypeptide. A subject is homozygous for an ST6GALNAC5 missense variant nucleic acid molecule encoding an ST6GALNAC5 predicted loss-of-function polypeptide when the subject has two copies of an ST6GALNAC5 missense variant nucleic acid molecule encoding an ST6GALNAC5 predicted loss-of-function polypeptide.

[0026] For subjects that are genotyped or determined to be ST6GALNAC5 reference, such subjects have an increased risk of developing cognitive impairment, such as decreased myelin integrity, neurodegeneration, decreased GWC, and conversion of mild cognitive impairment to dementia. For subjects that are genotyped or determined to be either ST6GALNAC5 reference or heterozygous for an ST6GALNAC5 missense variant nucleic acid molecule encoding an ST6GALNAC5 predicted loss-of-function polypeptide, such subjects can be treated with an ST6GALNAC5 inhibitor.

[0027] In any of the embodiments described throughout the present disclosure, the ST6GALNAC5 missense variant nucleic acid molecule encoding an ST6GALNAC5 predicted loss-of-function polypeptide can be any ST6GALNAC5 nucleic acid molecule (such as, for example, genomic nucleic acid molecule, mRNA molecule, or cDNA molecule) encoding an ST6GALNAC5 polypeptide having a partial loss-of-function, a complete loss-of-function, a predicted partial loss-of-function, or a predicted complete loss-of-function. For example, the ST6GALNAC5 missense variant nucleic acid molecule can be any nucleic acid molecule encoding ST6GALNAC5 Val135Ala, Val45Ala, Val45A1a*, or Val135A1a*. In some embodiments, the ST6GALNAC5 missense variant nucleic acid molecule encodes ST6GALNAC5 Val135Ala. In some embodiments, the ST6GALNAC5 missense variant nucleic acid molecule encodes ST6GALNAC5 Val45Ala. In some embodiments, the ST6GALNAC5 missense variant nucleic acid molecule encodes ST6GALNAC5 Val45A1a*. In some embodiments, the ST6GALNAC5 missense variant nucleic acid molecule encodes ST6GALNAC5 Val135A1a*.

[0028] In any of the embodiments described throughout the present disclosure, the ST6GALNAC5 predicted loss-of-function polypeptide can be any ST6GALNAC5 polypeptide having a partial loss-of-function, a complete loss-of-function, a predicted partial loss-of-function, or a predicted complete loss-of-function. In any of the embodiments described throughout the present disclosure, the ST6GALNAC5 predicted loss-of-function polypeptide can be any of the ST6GALNAC5 polypeptides described herein including, for example, ST6GALNAC5 Val135Ala, Val45Ala, Val45A1a*, or Val135A1a*. In some embodiments, the ST6GALNAC5 predicted loss-of-function polypeptide is ST6GALNAC5 Val135Ala. In some embodiments, the ST6GALNAC5 predicted loss-of-function polypeptide is ST6GALNAC5 Val45Ala. In some embodiments, the ST6GALNAC5 predicted loss-of-function polypeptide is ST6GALNAC5 Val45A1a*. In some embodiments, the ST6GALNAC5 predicted loss-of-function polypeptide is ST6GALNAC5 Val135A1a*.

[0029] In any of the embodiments described throughout the present disclosure, the cognitive impairment is decreased myelin integrity, neurodegeneration, decreased GWC, or conversion of mild cognitive impairment to dementia. In any of the embodiments described throughout the present disclosure, the cognitive impairment is decreased myelin integrity. In any of the embodiments described throughout the present disclosure, the cognitive impairment is neurodegeneration. In any of the embodiments described throughout the present disclosure, the cognitive impairment is decreased GWC. In any of the embodiments described throughout the present disclosure, the cognitive impairment is conversion of mild cognitive impairment to dementia.

[0030] Symptoms of cognitive impairment include, but are not limited to, memory loss, frequently asking the same question or repeating the same story several times, not recognizing familiar people and places, having difficulty exercising judgment (such as knowing what to do in an emergency), changes in mood or behavior, vision problems, and difficulty planning and carrying out tasks.

[0031] The present disclosure provides methods of treating a subject having cognitive impairment or at risk of developing cognitive impairment, the methods comprising administering an ST6GALNAC5 inhibitor to the subject.

[0032] The present disclosure also provides methods of treating a subject having decreased myelin integrity or at risk of developing decreased myelin integrity, the methods comprising administering an ST6GALNAC5 inhibitor to the subject.

[0033] The present disclosure also provides methods of treating a subject having neurodegeneration or at risk of developing neurodegeneration, the methods comprising administering an ST6GALNAC5 inhibitor to the subject.

[0034] The present disclosure also provides methods of treating a subject having decreased GWC or at risk of developing decreased GWC, the methods comprising administering an ST6GALNAC5 inhibitor to the subject.

[0035] The present disclosure also provides methods of treating a subject having conversion of mild cognitive impairment to dementia or at risk of conversion from mild cognitive impairment to dementia, the methods comprising administering an ST6GALNAC5 inhibitor to the subject.

[0036] In some embodiments, the ST6GALNAC5 inhibitor comprises an inhibitory nucleic acid molecule. In some embodiments, the inhibitory nucleic acid molecule comprises an antisense molecule, a small interfering RNA (siRNA) molecule, or a short hairpin RNA (shRNA) molecule. In some embodiments, the inhibitory nucleic acid molecule comprises an antisense molecule. In some embodiments, the inhibitory nucleic acid molecule comprises an siRNA molecule. In some embodiments, the inhibitory nucleic acid molecule comprises an shRNA molecule. Such inhibitory nucleic acid molecules can be designed to target any region of an ST6GALNAC5 nucleic acid molecule, such as an mRNA molecule. In some embodiments, the inhibitory nucleic acid molecule hybridizes to a sequence within an ST6GALNAC5 genomic nucleic acid molecule or mRNA molecule and decreases expression of the ST6GALNAC5 polypeptide in a cell in the subject. In some embodiments, the ST6GALNAC5 inhibitor comprises an antisense molecule that hybridizes to an ST6GALNAC5 genomic nucleic acid molecule or mRNA molecule and decreases expression of the ST6GALNAC5 polypeptide in a cell in the subject. In some embodiments, the ST6GALNAC5 inhibitor comprises an siRNA that hybridizes to an ST6GALNAC5 genomic nucleic acid molecule or mRNA molecule and decreases expression of the ST6GALNAC5 polypeptide in a cell in the subject. In some embodiments, the ST6GALNAC5 inhibitor comprises an shRNA that hybridizes to an ST6GALNAC5 genomic nucleic acid molecule or mRNA molecule and decreases expression of the ST6GALNAC5 polypeptide in a cell in the subject.

[0037] The inhibitory nucleic acid molecules can comprise RNA, DNA, or both RNA and DNA. The inhibitory nucleic acid molecules can also be linked or fused to a heterologous nucleic acid sequence, such as in a vector, or a heterologous label. For example, the inhibitory nucleic acid molecules can be within a vector or as an exogenous donor sequence comprising the inhibitory nucleic acid molecule and a heterologous nucleic acid sequence. The inhibitory nucleic acid molecules can also be linked or fused to a heterologous label. The label can be directly detectable (such as, for example, fluorophore) or indirectly detectable (such as, for example, hapten, enzyme, or fluorophore quencher). Such labels can be detectable by spectroscopic, photochemical, biochemical, immunochemical, or chemical means. Such labels include, for example, radiolabels, pigments, dyes, chromogens, spin labels, and fluorescent labels. The label can also be, for example, a chemiluminescent substance; a metal-containing substance; or an enzyme, where there occurs an enzyme-dependent secondary generation of signal. The term “label” can also refer to a “tag” or hapten that can bind selectively to a conjugated molecule such that the conjugated molecule, when added subsequently along with a substrate, is used to generate a detectable signal. For example, biotin can be used as a tag along with an avidin or streptavidin conjugate of horseradish peroxidate (HRP) to bind to the tag, and examined using a calorimetric substrate (such as, for example, tetramethylbenzidine (TMB)) or a fluorogenic substrate to detect the presence of HRP. Exemplary labels that can be used as tags to facilitate purification include, but are not limited to, myc, HA, FLAG or 3×FLAG, 6×His or polyhistidine, glutathione-S-transferase (GST), maltose binding protein, an epitope tag, or the Fc portion of immunoglobulin. Numerous labels include, for example, particles, fluorophores, haptens, enzymes and their calorimetric, fluorogenic and chemiluminescent substrates and other labels.

[0038] The inhibitory nucleic acid molecules can comprise, for example, nucleotides or non-natural or modified nucleotides, such as nucleotide analogs or nucleotide substitutes. Such nucleotides include a nucleotide that contains a modified base, sugar, or phosphate group, or that incorporates a non-natural moiety in its structure. Examples of non-natural nucleotides include, but are not limited to, dideoxynucleotides, biotinylated, aminated, deaminated, alkylated, benzylated, and fluorophor-labeled nucleotides.

[0039] The inhibitory nucleic acid molecules can also comprise one or more nucleotide analogs or substitutions. A nucleotide analog is a nucleotide which contains a modification to either the base, sugar, or phosphate moieties. Modifications to the base moiety include, but are not limited to, natural and synthetic modifications of A, C, G, and T/U, as well as different purine or pyrimidine bases such as, for example, pseudouridine, uracil-5-yl, hypoxanthin-9-yl (I), and 2-aminoadenin-9-yl. Modified bases include, but are not limited to, 5-methylcytosine (5-me-C), 5-hydroxymethyl cytosine, xanthine, hypoxanthine, 2-aminoadenine, 6-methyl and other alkyl derivatives of adenine and guanine, 2-propyl and other alkyl derivatives of adenine and guanine, 2-thiouracil, 2-thiothymine and 2-thiocytosine, 5-halouracil and cytosine, 5-propynyl uracil and cytosine, 6-azo uracil, cytosine and thymine, 5-uracil (pseudouracil), 4-thiouracil, 8-halo, 8-amino, 8-thiol, 8-thioalkyl, 8-hydroxyl and other 8-substituted adenines and guanines, 5-halo (such as, for example, 5-bromo), 5-trifluoromethyl and other 5-substituted uracils and cytosines, 7-methylguanine, 7-methyladenine, 8-azaguanine, 8-azaadenine, 7-deazaguanine, 7-deazaadenine, 3-deazaguanine, and 3-deazaadenine.

[0040] Nucleotide analogs can also include modifications of the sugar moiety. Modifications to the sugar moiety include, but are not limited to, natural modifications of the ribose and deoxy ribose as well as synthetic modifications. Sugar modifications include, but are not limited to, the following modifications at the 2′ position: OH; F; O-, S-, or N-alkyl; O-, S-, or N-alkenyl; O-, S- or N-alkynyl; or O-alkyl-O-alkyl, wherein the alkyl, alkenyl, and alkynyl may be substituted or unsubstituted C₁₋₁₀alkyl or C₂₋₁₀alkenyl, and C₂₋₁₀alkynyl. Exemplary 2′ sugar modifications also include, but are not limited to, —O[(CH₂)ₙO]ₘCH₃, —O(CH₂)ₙOCH₃, —O(CH₂)ₙNH₂, —O(CH₂)ₙCH₃, —O(CH₂)ₙ—ONH₂, and —O(CH₂)ₙON[(CH₂)ₙCH₃)]₂, where n and m, independently, are from 1 to about 10. Other modifications at the 2′ position include, but are not limited to, C₁₋₁₀alkyl, substituted lower alkyl, alkaryl, aralkyl, O-alkaryl or O-aralkyl, SH, SCH₃, OCN, Cl, Br, CN, CF₃, OCF₃, SOCH₃, SO₂CH₃, ONO₂, NO₂, N₃, NH₂, heterocycloalkyl, heterocycloalkaryl, aminoalkylamino, polyalkylamino, substituted silyl, an RNA cleaving group, a reporter group, an intercalator, a group for improving the pharmacokinetic properties of an oligonucleotide, or a group for improving the pharmacodynamic properties of an oligonucleotide, and other substituents having similar properties. Similar modifications may also be made at other positions on the sugar, particularly the 3′ position of the sugar on the 3′ terminal nucleotide or in 2′-5′ linked oligonucleotides and the 5′ position of 5′ terminal nucleotide. Modified sugars can also include those that contain modifications at the bridging ring oxygen, such as CH₂ and S. Nucleotide sugar analogs can also have sugar mimetics, such as cyclobutyl moieties in place of the pentofuranosyl sugar.

[0041] Nucleotide analogs can also be modified at the phosphate moiety. Modified phosphate moieties include, but are not limited to, those that can be modified so that the linkage between two nucleotides contains a phosphorothioate, chiral phosphorothioate, phosphorodithioate, phosphotriester, aminoalkylphosphotriester, methyl and other alkyl phosphonates including 3′-alkylene phosphonate and chiral phosphonates, phosphinates, phosphoramidates including 3′-amino phosphoramidate and aminoalkylphosphoramidates, thionophosphoramidates, thionoalkylphosphonates, thionoalkylphosphotriesters, and boranophosphates. These phosphate or modified phosphate linkage between two nucleotides can be through a 3′-5′ linkage or a 2′-5′ linkage, and the linkage can contain inverted polarity such as 3′-5′ to 5′-3′ or 2′-5′ to 5′-2′. Various salts, mixed salts, and free acid forms are also included. Nucleotide substitutes also include peptide nucleic acids (PNAs).

[0042] In some embodiments, the antisense nucleic acid molecules are gapmers, whereby the first one to seven nucleotides at the 5′ and 3′ ends each have 2′-methoxyethyl (2′-MOE) modifications. In some embodiments, the first five nucleotides at the 5′ and 3′ ends each have 2′-MOE modifications. In some embodiments, the first one to seven nucleotides at the 5′ and 3′ ends are RNA nucleotides. In some embodiments, the first five nucleotides at the 5′ and 3′ ends are RNA nucleotides. In some embodiments, each of the backbone linkages between the nucleotides is a phosphorothioate linkage.

[0043] In some embodiments, the siRNA molecules have termini modifications. In some embodiments, the 5′ end of the antisense strand is phosphorylated. In some embodiments, 5′-phosphate analogs that cannot be hydrolyzed, such as 5′-(E)-vinyl-phosphonate are used.

[0044] In some embodiments, the siRNA molecules have backbone modifications. In some embodiments, the modified phosphodiester groups that link consecutive ribose nucleosides have been shown to enhance the stability and in vivo bioavailability of siRNAs The non-ester groups (—OH, ═O) of the phosphodiester linkage can be replaced with sulfur, boron, or acetate to give phosphorothioate, boranophosphate, and phosphonoacetate linkages. In addition, substituting the phosphodiester group with a phosphotriester can facilitate cellular uptake of siRNAs and retention on serum components by eliminating their negative charge. In some embodiments, the siRNA molecules have sugar modifications. In some embodiments, the sugars are deprotonated (reaction catalyzed by exo- and endonucleases) whereby the 2′-hydroxyl can act as a nucleophile and attack the adjacent phosphorous in the phosphodiester bond. Such alternatives include 2′-O-methyl, 2′-O-methoxyethyl, and 2′-fluoro modifications.

[0045] In some embodiments, the siRNA molecules have base modifications. In some embodiments, the bases can be substituted with modified bases such as pseudouridine, 5′-methylcytidine, N6-methyladenosine, inosine, and N7-methylguanosine.

[0046] In some embodiments, the siRNA molecules are conjugated to lipids. Lipids can be conjugated to the 5′ or 3′ termini of siRNA to improve their in vivo bioavailability by allowing them to associate with serum lipoproteins. Representative lipids include, but are not limited to, cholesterol and vitamin E, and fatty acids, such as palmitate and tocopherol.

[0047] In some embodiments, a representative siRNA has the following formula:

Sense: mN*mN*/i2FN/mN/i2FN/mN/i2FN/mN/i2FN/mN/i2FN/mN/i2FN/mN/i2FN/mN/i2FN/*mN*/32FN/

### Antisense: /52FN/*/i2FN/*mN/i2FN/mN/i2FN/mN/i2FN/mN/i2FN/mN/i2FN/mN/i2FN/mN/i2FN/mN/i2FN/mN*N*N

[0048] wherein: “N” is the base; “2F” is a 2′-F modification; “m” is a 2′-O-methyl modification, “I” is an internal base; and “*” is a phosphorothioate backbone linkage.

[0049] The present disclosure also provides vectors comprising any one or more of the inhibitory nucleic acid molecules. In some embodiments, the vectors comprise any one or more of the inhibitory nucleic acid molecules and a heterologous nucleic acid. The vectors can be viral or nonviral vectors capable of transporting a nucleic acid molecule. In some embodiments, the vector is a plasmid or cosmid (such as, for example, a circular double-stranded DNA into which additional DNA segments can be ligated). In some embodiments, the vector is a viral vector, wherein additional DNA segments can be ligated into the viral genome. Expression vectors include, but are not limited to, plasmids, cosmids, retroviruses, adenoviruses, adeno-associated viruses (AAV), plant viruses such as cauliflower mosaic virus and tobacco mosaic virus, yeast artificial chromosomes (YACs), Epstein-Barr (EBV)-derived episomes, and other expression vectors known in the art.

[0050] The present disclosure also provides compositions comprising any one or more of the inhibitory nucleic acid molecules. In some embodiments, the composition is a pharmaceutical composition. In some embodiments, the compositions comprise a carrier and/or excipient. Examples of carriers include, but are not limited to, poly(lactic acid) (PLA) microspheres, poly(D,L-lactic-coglycolic-acid) (PLGA) microspheres, liposomes, micelles, inverse micelles, lipid cochleates, and lipid microtubules. A carrier may comprise a buffered salt solution such as PBS, HBSS, etc.

[0051] In some embodiments, the ST6GALNAC5 inhibitor comprises a nuclease agent that induces one or more nicks or double-strand breaks at a recognition sequence(s) or a DNA-binding protein that binds to a recognition sequence within an ST6GALNAC5 genomic nucleic acid molecule. The recognition sequence can be located within a coding region of the ST6GALNAC5 gene, or within regulatory regions that influence the expression of the gene. A recognition sequence of the DNA-binding protein or nuclease agent can be located in an intron, an exon, a promoter, an enhancer, a regulatory region, or any non-protein coding region. The recognition sequence can include or be proximate to the start codon of the ST6GALNAC5 gene. For example, the recognition sequence can be located about 10, about 20, about 30, about 40, about 50, about 100, about 200, about 300, about 400, about 500, or about 1,000 nucleotides from the start codon. As another example, two or more nuclease agents can be used, each targeting a nuclease recognition sequence including or proximate to the start codon. As another example, two nuclease agents can be used, one targeting a nuclease recognition sequence including or proximate to the start codon, and one targeting a nuclease recognition sequence including or proximate to the stop codon, wherein cleavage by the nuclease agents can result in deletion of the coding region between the two nuclease recognition sequences. Any nuclease agent that induces a nick or double-strand break into a desired recognition sequence can be used in the methods and compositions disclosed herein. Any DNA-binding protein that binds to a desired recognition sequence can be used in the methods and compositions disclosed herein.

[0052] Suitable nuclease agents and DNA-binding proteins for use herein include, but are not limited to, zinc finger protein or zinc finger nuclease (ZFN) pair, Transcription Activator-Like Effector (TALE) protein or Transcription Activator-Like Effector Nuclease (TALEN), or

[0053] Clustered Regularly Interspersed Short Palindromic Repeats (CRISPR)/CRISPR-associated (Cas) systems. The length of the recognition sequence can vary, and includes, for example, recognition sequences that are about 30-36 bp for a zinc finger protein or ZFN pair, about 15-18 bp for each ZFN, about 36 bp for a TALE protein or TALEN, and about 20 bp for a CRISPR/Cas guide RNA.

[0054] In some embodiments, CRISPR/Cas systems can be used to modify an ST6GALNAC5 genomic nucleic acid molecule within a cell. The methods and compositions disclosed herein can employ CRISPR-Cas systems by utilizing CRISPR complexes (comprising a guide RNA (gRNA) complexed with a Cas protein) for site-directed cleavage of ST6GALNAC5 nucleic acid molecules.

[0055] Cas proteins generally comprise at least one RNA recognition or binding domain that can interact with gRNAs. Cas proteins can also comprise nuclease domains (such as, for example, DNase or RNase domains), DNA binding domains, helicase domains, protein-protein interaction domains, dimerization domains, and other domains. Suitable Cas proteins include, for example, a wild type Cas9 protein and a wild type Cpf1 protein (such as, for example, FnCpf1). A Cas protein can have full cleavage activity to create a double-strand break in an ST6GALNAC5 genomic nucleic acid molecule or it can be a nickase that creates a single-strand break in an ST6GALNAC5 genomic nucleic acid molecule. Additional examples of Cas proteins include, but are not limited to, Cas1, Cas1B, Cast, Cas3, Cas4, Cas5, Cas5e (CasD), Cas6, Cas6e, Cas6f, Cas7, Cas8a1, Cas8a2, Cas8b, Cas8c, Cas9 (Csn1 or Csx12), Cas10, Cas10d, CasF, CasG, CasH, Csy1, Csy2, Csy3, Cse1 (CasA), Cse2 (Cas6), Cse3 (CasE), Cse4 (CasC), Csc1, Csc2, Csa5, Csn2, Csm2, Csm3, Csm4, Csm5, Csm6, Cmr1, Cmr3, Cmr4, Cmr5, Cmr6, Csb1, Csb2, Csb3, Csx17, Csx14, Csx10, Csx16, CsaX, Csx3, Csx1, Csx15, Csf1, Csf2, Csf3, Csf4, and Cu1966, and homologs or modified versions thereof. Cas proteins can also be operably linked to heterologous polypeptides as fusion proteins. For example, a Cas protein can be fused to a cleavage domain, an epigenetic modification domain, a transcriptional activation domain, or a transcriptional repressor domain. Cas proteins can be provided in any form. For example, a Cas protein can be provided in the form of a protein, such as a Cas protein complexed with a gRNA. Alternately, a Cas protein can be provided in the form of a nucleic acid molecule encoding the Cas protein, such as an RNA or DNA.

[0056] In some embodiments, targeted genetic modifications of an ST6GALNAC5 genomic nucleic acid molecules can be generated by contacting a cell with a Cas protein and one or more gRNAs that hybridize to one or more gRNA recognition sequences within a target genomic locus in the ST6GALNAC5 genomic nucleic acid molecule. For example, a gRNA recognition sequence can be located within a region of SEQ ID NO:1. The gRNA recognition sequence can also include or be proximate to a position corresponding to position 176,867 according to SEQ ID NO:1. For example, the gRNA recognition sequence can be located from about 1000, from about 500, from about 400, from about 300, from about 200, from about 100, from about 50, from about 45, from about 40, from about 35, from about 30, from about 25, from about 20, from about 15, from about 10, or from about 5 nucleotides of a position corresponding to position 176,867 according to SEQ ID NO:1. The gRNA recognition sequence can include or be proximate to the start codon of an ST6GALNAC5 genomic nucleic acid molecule or the stop codon of an ST6GALNAC5 genomic nucleic acid molecule. For example, the gRNA recognition sequence can be located from about 10, from about 20, from about 30, from about 40, from about 50, from about 100, from about 200, from about 300, from about 400, from about 500, or from about 1,000 nucleotides of the start codon or the stop codon.

[0057] The gRNA recognition sequences within a target genomic locus in an ST6GALNAC5 genomic nucleic acid molecule are located near a Protospacer Adjacent Motif (PAM) sequence, which is a 2-6 base pair DNA sequence immediately following the DNA sequence targeted by the Cas9 nuclease. The canonical PAM is the sequence 5′-NGG-3′ where “N” is any nucleobase followed by two guanine (“G”) nucleobases. gRNAs can transport Cas9 to anywhere in the genome for gene editing, but no editing can occur at any site other than one at which Cas9 recognizes PAM. In addition, 5′-NGA-3′ can be a highly efficient non-canonical PAM for human cells. Generally, the PAM is about 2 to about 6 nucleotides downstream of the DNA sequence targeted by the gRNA. The PAM can flank the gRNA recognition sequence. In some embodiments, the gRNA recognition sequence can be flanked on the 3′ end by the PAM. In some embodiments, the gRNA recognition sequence can be flanked on the 5′ end by the PAM. For example, the cleavage site of Cas proteins can be about 1 to about 10 base pairs, about 2 to about 5 base pairs, or 3 base pairs upstream or downstream of the PAM sequence. In some embodiments (such as when Cas9 from S. pyogenes or a closely related Cas9 is used), the PAM sequence of the non-complementary strand can be 5′-NGG-3′, where N is any DNA nucleotide and is immediately 3′ of the gRNA recognition sequence of the non-complementary strand of the target DNA. As such, the PAM sequence of the complementary strand would be 5′-CCN-3′, where N is any DNA nucleotide and is immediately 5′ of the gRNA recognition sequence of the complementary strand of the target DNA.

[0058] A gRNA is an RNA molecule that binds to a Cas protein and targets the Cas protein to a specific location within an ST6GALNAC5 genomic nucleic acid molecule. An exemplary gRNA is a gRNA effective to direct a Cas enzyme to bind to or cleave an ST6GALNAC5 genomic nucleic acid molecule, wherein the gRNA comprises a DNA-targeting segment that hybridizes to a gRNA recognition sequence within the ST6GALNAC5 genomic nucleic acid molecule that includes or is proximate to a position corresponding to position 176,867 according to SEQ ID NO:1. For example, a gRNA can be selected such that it hybridizes to a gRNA recognition sequence that is located about 5, about 10, about 15, about 20, about 25, about 30, about 35, about 40, about 45, about 50, about 100, about 200, about 300, about 400, about 500, or about 1,000 nucleotides from a position corresponding to position 176,867 according to SEQ ID NO:1. Other exemplary gRNAs comprise a DNA-targeting segment that hybridizes to a gRNA recognition sequence present within an ST6GALNAC5 genomic nucleic acid molecule that includes or is proximate to the start codon or the stop codon. For example, a gRNA can be selected such that it hybridizes to a gRNA recognition sequence that is located about 5, about 10, about 15, about 20, about 25, about 30, about 35, about 40, about 45, about 50, about 100, about 200, about 300, about 400, about 500, or about 1,000 nucleotides of the start codon or located about 5, about 10, about 15, about 20, about 25, about 30, about 35, about 40, about 45, about 50, about 100, about 200, about 300, about 400, about 500, or about 1,000 nucleotides of the stop codon. Suitable gRNAs can comprise from about 17 to about 25 nucleotides, from about 17 to about 23 nucleotides, from about 18 to about 22 nucleotides, or from about 19 to about 21 nucleotides. In some embodiments, the gRNAs can comprise 20 nucleotides.

[0059] Examples of suitable gRNA recognition sequences located within the ST6GALNAC5 reference gene are set forth in Table 1 as SEQ ID NOs:43-62.

TABLE 1
Guide RNA Recognition Sequences Within ST6GALNAC5

| Strand | gRNA Recognition Sequence | SEQ ID NO: |
|---|---|---|
| − | CTTGTGGCGAGTAATCATGA | 43 |
| + | ATGAATGACGCCCCCACACG | 44 |
| + | GGACGGATACCTCGGAGTGG | 45 |
| + | CGCGGCTATGGGCGTGACGT | 46 |
| − | GTGTGGGGGCGTCATTCATG | 47 |
| − | GCTGTACACTAGCAACAAGC | 48 |
| + | GGGGCCCCAGCAGCTACATG | 49 |
| − | CCTTGTGGTCCGCCACTCCG | 50 |
| + | CCTCGGAGTGGCGGACCACA | 51 |
| − | ACTCCGAGGTATCCGTCCAG | 52 |
| + | TGGGCAATCGCACCAGCCTG | 53 |
| + | AGCAGCTACATGCGGCGGGA | 54 |
| − | AGGTATCCGTCCAGTGGCCG | 55 |
| − | GTCACGCCCATAGCCGCGTG | 56 |
| − | CACGCCCATAGCCGCGTGTG | 57 |
| + | TCGCGCATTCCAGCATCCAG | 58 |
| − | ACGCCCATAGCCGCGTGTGG | 59 |
| − | GCGGGCATGCTGTCACCTTG | 60 |
| + | CATCTGCTGCACAGTCGGCA | 61 |
| + | CAGCAGCAGGCGTCGGCCAC | 62 |

[0060] The Cas protein and the gRNA form a complex, and the Cas protein cleaves the target ST6GALNAC5 genomic nucleic acid molecule. The Cas protein can cleave the nucleic acid molecule at a site within or outside of the nucleic acid sequence present in the target ST6GALNAC5 genomic nucleic acid molecule to which the DNA-targeting segment of a gRNA will bind. For example, formation of a CRISPR complex (comprising a gRNA hybridized to a gRNA recognition sequence and complexed with a Cas protein) can result in cleavage of one or both strands in or near (such as, for example, within 1, 2, 3, 4, 5, 6, 7, 8, 9, 10, 20, 50, or more base pairs from) the nucleic acid sequence present in the ST6GALNAC5 genomic nucleic acid molecule to which a DNA-targeting segment of a gRNA will bind.

[0061] Such methods can result, for example, in an ST6GALNAC5 genomic nucleic acid molecule in which a region of SEQ ID NO:1 is disrupted, the start codon is disrupted, the stop codon is disrupted, or the coding sequence is disrupted or deleted. Optionally, the cell can be further contacted with one or more additional gRNAs that hybridize to additional gRNA recognition sequences within the target genomic locus in the ST6GALNAC5 genomic nucleic acid molecule. By contacting the cell with one or more additional gRNAs (such as, for example, a second gRNA that hybridizes to a second gRNA recognition sequence), cleavage by the Cas protein can create two or more double-strand breaks or two or more single-strand breaks.

[0062] In some embodiments, the ST6GALNAC5 inhibitor comprises a small molecule. In some embodiments, the ST6GALNAC5 inhibitor is myricetin.

[0063] In some embodiments, the methods of treatment further comprise detecting the presence or absence of an ST6GALNAC5 missense variant nucleic acid molecule encoding an ST6GALNAC5 predicted loss-of-function polypeptide in a biological sample obtained from the subject. As used throughout the present disclosure, “an ST6GALNAC5 missense variant nucleic acid molecule” is any ST6GALNAC5 nucleic acid molecule (such as, for example, genomic nucleic acid molecule, mRNA molecule, or cDNA molecule) encoding an ST6GALNAC5 polypeptide having a partial loss-of-function, a complete loss-of-function, a predicted partial loss-of-function, or a predicted complete loss-of-function.

[0064] The present disclosure also provides methods of treating a subject with a therapeutic agent that treats or inhibits cognitive impairment. In some embodiments, the subject has cognitive impairment. In some embodiments, the methods comprise determining whether the subject has an ST6GALNAC5 missense variant nucleic acid molecule encoding an ST6GALNAC5 predicted loss-of-function polypeptide by obtaining or having obtained a biological sample from the subject, and performing or having performed a sequence analysis on the biological sample to determine if the subject has a genotype comprising the ST6GALNAC5 missense variant nucleic acid molecule. When the subject is ST6GALNAC5 reference, the therapeutic agent that treats or inhibits cognitive impairment is administered or continued to be administered to the subject in a standard dosage amount, and/or an ST6GALNAC5 inhibitor is administered to the subject. When the subject is heterozygous for an ST6GALNAC5 missense variant nucleic acid molecule, the therapeutic agent that treats or inhibits cognitive impairment is administered or continued to be administered to the subject in an amount that is the same as or less than a standard dosage amount, and/or an ST6GALNAC5 inhibitor is administered to the subject. The presence of a genotype having an ST6GALNAC5 missense variant nucleic acid molecule encoding an ST6GALNAC5 predicted loss-of-function polypeptide indicates the subject has a decreased risk of developing cognitive impairment. In some embodiments, the subject is ST6GALNAC5 reference. In some embodiments, the subject is heterozygous for an ST6GALNAC5 missense variant nucleic acid molecule encoding an ST6GALNAC5 predicted loss-of-function polypeptide.

[0065] For subjects that are genotyped or determined to be either ST6GALNAC5 reference or heterozygous for an ST6GALNAC5 missense variant nucleic acid molecule encoding an ST6GALNAC5 predicted loss-of-function polypeptide, such subjects can be treated with an ST6GALNAC5 inhibitor, as described herein.

[0066] Detecting the presence or absence of an ST6GALNAC5 missense variant nucleic acid molecule encoding an ST6GALNAC5 predicted loss-of-function polypeptide in a biological sample from a subject and/or determining whether a subject has an ST6GALNAC5 missense variant nucleic acid molecule encoding an ST6GALNAC5 predicted loss-of-function polypeptide can be carried out by any of the methods described herein. In some embodiments, these methods can be carried out in vitro. In some embodiments, these methods can be carried out in situ. In some embodiments, these methods can be carried out in vivo. In any of these embodiments, the ST6GALNAC5 missense variant nucleic acid molecule encoding an ST6GALNAC5 predicted loss-of-function polypeptide can be present within a cell obtained from the subject.

[0067] In some embodiments, when the subject is ST6GALNAC5 reference, the subject is also administered a therapeutic agent that treats or inhibits cognitive impairment in a standard dosage amount. In some embodiments, when the subject is heterozygous for an ST6GALNAC5 missense variant nucleic acid molecule encoding an ST6GALNAC5 predicted loss-of-function polypeptide, the subject is also administered a therapeutic agent that treats or inhibits cognitive impairment in a dosage amount that is the same as or less than a standard dosage amount.

[0068] In some embodiments, the treatment methods further comprise detecting the presence or absence of an ST6GALNAC5 predicted loss-of-function polypeptide in a biological sample from the subject. In some embodiments, when the subject does not have an ST6GALNAC5 predicted loss-of-function polypeptide, the subject is also administered a therapeutic agent that treats or inhibits cognitive impairment in a standard dosage amount. In some embodiments, when the subject has an ST6GALNAC5 predicted loss-of-function polypeptide, the subject is also administered a therapeutic agent that treats or inhibits cognitive impairment in a dosage amount that is the same as or less than a standard dosage amount.

[0069] The present disclosure also provides methods of treating a subject with a therapeutic agent that treats or prevents cognitive impairment. In some embodiments, the subject has cognitive impairment. In some embodiments, the subject is at risk of developing cognitive impairment. In some embodiments, the method comprises determining whether the subject has an ST6GALNAC5 predicted loss-of-function polypeptide by obtaining or having obtained a biological sample from the subject, and performing or having performed an assay on the biological sample to determine if the subject has an ST6GALNAC5 predicted loss-of-function polypeptide. When the subject does not have an ST6GALNAC5 predicted loss-of-function polypeptide, the therapeutic agent that treats or inhibits cognitive impairment is administered or continued to be administered to the subject in a standard dosage amount, and/or an ST6GALNAC5 inhibitor is administered to the subject. When the subject has an ST6GALNAC5 predicted loss-of-function polypeptide, the therapeutic agent that treats or inhibits cognitive impairment is administered or continued to be administered to the subject in an amount that is the same as or less than a standard dosage amount, and/or an ST6GALNAC5 inhibitor is administered to the subject. The presence of an ST6GALNAC5 predicted loss-of-function polypeptide indicates the subject has a decreased risk of developing cognitive impairment. In some embodiments, the subject has an ST6GALNAC5 predicted loss-of-function polypeptide. In some embodiments, the subject does not have an ST6GALNAC5 predicted loss-of-function polypeptide.

[0070] Detecting the presence or absence of an ST6GALNAC5 predicted loss-of-function polypeptide in a biological sample from a subject and/or determining whether a subject has an ST6GALNAC5 predicted loss-of-function polypeptide can be carried out by any of the methods described herein. In some embodiments, these methods can be carried out in vitro. In some embodiments, these methods can be carried out in situ. In some embodiments, these methods can be carried out in vivo. In any of these embodiments, the ST6GALNAC5 predicted loss-of-function polypeptide can be present within a cell obtained from the subject.

[0071] Examples of therapeutic agents that treat or prevent cognitive impairment include, but are not limited to: a cholinesterase inhibitor, vitamin E, and ginkgo. In some embodiments, the therapeutic agent that treats or inhibits cognitive impairment is a cholinesterase inhibitor. In some embodiments, the therapeutic agent that treats or inhibits cognitive impairment is vitamin E. In some embodiments, the therapeutic agent that treats or inhibits cognitive impairment is ginkgo. In some embodiments, the cholinesterase inhibitor is ARICEPT® or ARICEPT® ODT (donepezil), COGNEX® (tacrine), EXELON® or EXELON® Patch (rivastigmine), RAZADYNE® (galantamine), NAMZARIC® (memantine/donepezil), MYTELASE® (ambenonium), or BLOXIVERZ® (neostigmine). In some embodiments, the cholinesterase inhibitor is donepezil, tacrine, rivastigmine, galantamine, memantine/donepezil, ambenonium, or neostigmine. In some embodiments, the cholinesterase inhibitor is donepezil. In some embodiments, the cholinesterase inhibitor is tacrine. In some embodiments, the cholinesterase inhibitor is rivastigmine. In some embodiments, the cholinesterase inhibitor is galantamine. In some embodiments, the cholinesterase inhibitor is memantine/donepezil. In some embodiments, the cholinesterase inhibitor is ambenonium. In some embodiments, the cholinesterase inhibitor is neostigmine.

[0072] In some embodiments, the dose of the therapeutic agents that treat or prevent cognitive impairment can be reduced by about 10%, by about 20%, by about 30%, by about 40%, by about 50%, by about 60%, by about 70%, by about 80%, or by about 90% for subjects that are heterozygous for an ST6GALNAC5 missense variant nucleic acid molecule encoding an ST6GALNAC5 predicted loss-of-function polypeptide (i.e., a less than the standard dosage amount) compared to subjects that are ST6GALNAC5 reference (who may receive a standard dosage amount). In some embodiments, the dose of the therapeutic agents that treat or prevent cognitive impairment can be reduced by about 10%, by about 20%, by about 30%, by about 40%, or by about 50%. In addition, the dose of therapeutic agents that treat or prevent cognitive impairment in subjects that are heterozygous for an ST6GALNAC5 missense variant nucleic acid molecule encoding an ST6GALNAC5 predicted loss-of-function polypeptide can be administered less frequently compared to subjects that are ST6GALNAC5 reference.

[0073] Administration of the therapeutic agents that treat or prevent cognitive impairment and/or ST6GALNAC5 inhibitors can be repeated, for example, after one day, two days, three days, five days, one week, two weeks, three weeks, one month, five weeks, six weeks, seven weeks, eight weeks, two months, or three months. The repeated administration can be at the same dose or at a different dose. The administration can be repeated once, twice, three times, four times, five times, six times, seven times, eight times, nine times, ten times, or more. For example, according to certain dosage regimens a subject can receive therapy for a prolonged period of time such as, for example, 6 months, 1 year, or more. In addition, the therapeutic agents that treat or prevent cognitive impairment and/or ST6GALNAC5 inhibitors can be administered sequentially or at the same time. In addition, the therapeutic agents that treat or prevent cognitive impairment and/or ST6GALNAC5 inhibitors can be administered in separate compositions or can be administered together in the same composition.

[0074] Administration of the therapeutic agents that treat or prevent cognitive impairment and/or ST6GALNAC5 inhibitors can occur by any suitable route including, but not limited to, parenteral, intravenous, oral, subcutaneous, intra-arterial, intracranial, intrathecal, intraperitoneal, topical, intranasal, or intramuscular. Pharmaceutical compositions for administration are desirably sterile and substantially isotonic and manufactured under GMP conditions. Pharmaceutical compositions can be provided in unit dosage form (i.e., the dosage for a single administration). Pharmaceutical compositions can be formulated using one or more physiologically and pharmaceutically acceptable carriers, diluents, excipients or auxiliaries. The formulation depends on the route of administration chosen. The term “pharmaceutically acceptable” means that the carrier, diluent, excipient, or auxiliary is compatible with the other ingredients of the formulation and not substantially deleterious to the recipient thereof.

[0075] The terms “treat”, “treating”, and “treatment” and “prevent”, “preventing”, and “prevention” as used herein, refer to eliciting the desired biological response, such as a therapeutic and prophylactic effect, respectively. In some embodiments, a therapeutic effect comprises one or more of a decrease/reduction in cognitive impairment, a decrease/reduction in the severity of cognitive impairment (such as, for example, a reduction or inhibition of development of cognitive impairment), a decrease/reduction in symptoms and cognitive impairment-related effects, delaying the onset of symptoms and cognitive impairment-related effects, reducing the severity of symptoms of cognitive impairment-related effects, reducing the severity of an acute episode, reducing the number of symptoms and cognitive impairment-related effects, reducing the latency of symptoms and cognitive impairment-related effects, an amelioration of symptoms and cognitive impairment-related effects, reducing secondary symptoms, reducing secondary infections, preventing relapse to cognitive impairment, decreasing the number or frequency of relapse episodes, increasing latency between symptomatic episodes, increasing time to sustained progression, expediting remission, inducing remission, augmenting remission, speeding recovery, or increasing efficacy of or decreasing resistance to alternative therapeutics, and/or an increased survival time of the affected host animal, following administration of the agent or composition comprising the agent. A prophylactic effect may comprise a complete or partial avoidance/inhibition or a delay of cognitive impairment development/progression (such as, for example, a complete or partial avoidance/inhibition or a delay), and an increased survival time of the affected host animal, following administration of a therapeutic protocol. Treatment of cognitive impairment encompasses the treatment of subjects already diagnosed as having any form of cognitive impairment at any clinical stage or manifestation, the delay of the onset or evolution or aggravation or deterioration of the symptoms or signs of cognitive impairment, and/or preventing and/or reducing the severity of cognitive impairment.

[0076] The present disclosure also provides methods of identifying a subject having an increased risk of developing cognitive impairment. In some embodiments, the methods comprise determining or having determined the presence or absence of an ST6GALNAC5 missense variant nucleic acid molecule (such as a genomic nucleic acid molecule, mRNA molecule, and/or cDNA molecule) encoding an ST6GALNAC5 predicted loss-of-function polypeptide in a biological sample obtained from the subject. When the subject lacks an ST6GALNAC5 missense variant nucleic acid molecule encoding an ST6GALNAC5 predicted loss-of-function polypeptide (i.e., the subject is genotypically categorized as ST6GALNAC5 reference), then the subject has an increased risk of developing cognitive impairment. When the subject has an ST6GALNAC5 missense variant nucleic acid molecule encoding an ST6GALNAC5 predicted loss-of-function polypeptide (i.e., the subject is heterozygous or homozygous for an ST6GALNAC5 missense variant nucleic acid molecule), then the subject has a decreased risk of developing cognitive impairment compared to a subject that is ST6GALNAC5 reference.

[0077] Having a single copy of an ST6GALNAC5 missense variant nucleic acid molecule encoding an ST6GALNAC5 predicted loss-of-function polypeptide is more protective of a subject from developing cognitive impairment than having no copies of an ST6GALNAC5 missense variant nucleic acid molecule encoding an ST6GALNAC5 predicted loss-of-function polypeptide. Without intending to be limited to any particular theory or mechanism of action, it is believed that a single copy of an ST6GALNAC5 missense variant nucleic acid molecule encoding an ST6GALNAC5 predicted loss-of-function polypeptide (i.e., heterozygous for an ST6GALNAC5 missense variant nucleic acid molecule) is protective of a subject from developing cognitive impairment, and it is also believed that having two copies of an ST6GALNAC5 missense variant nucleic acid molecule encoding an ST6GALNAC5 predicted loss-of-function polypeptide (i.e., homozygous for an ST6GALNAC5 missense variant nucleic acid molecule) may be more protective of a subject from developing cognitive impairment, relative to a subject with a single copy. Thus, in some embodiments, a single copy of an ST6GALNAC5 missense variant nucleic acid molecule encoding an ST6GALNAC5 predicted loss-of-function polypeptide may not be completely protective, but instead, may be partially or incompletely protective of a subject from developing cognitive impairment. While not desiring to be bound by any particular theory, there may be additional factors or molecules involved in the development of cognitive impairment that are still present in a subject having a single copy of an ST6GALNAC5 missense variant nucleic acid molecule encoding an ST6GALNAC5 predicted loss-of-function polypeptide, thus resulting in less than complete protection from the development of cognitive impairment.

[0078] Detecting the presence or absence of an ST6GALNAC5 missense variant nucleic acid molecule encoding an ST6GALNAC5 predicted loss-of-function polypeptide in a biological sample from the subject and/or determining whether a subject has an ST6GALNAC5 missense variant nucleic acid molecule encoding an ST6GALNAC5 predicted loss-of-function polypeptide can be carried out by any of the methods described herein. In some embodiments, these methods can be carried out in vitro. In some embodiments, these methods can be carried out in situ. In some embodiments, these methods can be carried out in vivo. In any of these embodiments, the ST6GALNAC5 missense variant nucleic acid molecule encoding an ST6GALNAC5 predicted loss-of-function polypeptide can be present within a cell obtained from the subject.

[0079] In some embodiments, when a subject is identified as having an increased risk of developing cognitive impairment, the subject is further treated with a therapeutic agent that treats or inhibits cognitive impairment and/or an ST6GALNAC5 inhibitor, as described herein. For example, when the subject is ST6GALNAC5 reference, and therefore has an increased risk of developing cognitive impairment, the subject is administered an ST6GALNAC5 inhibitor. In some embodiments, such a subject is administered a therapeutic agent that treats or inhibits cognitive impairment. In some embodiments, when the subject is heterozygous for an ST6GALNAC5 missense variant nucleic acid molecule encoding an ST6GALNAC5 predicted loss-of-function polypeptide, the subject is administered the therapeutic agent that treats or inhibits cognitive impairment in a dosage amount that is the same as or less than a standard dosage amount, and/or is administered an ST6GALNAC5 inhibitor. In some embodiments, the subject is ST6GALNAC5 reference. In some embodiments, the subject is heterozygous for an ST6GALNAC5 missense variant nucleic acid molecule encoding an ST6GALNAC5 predicted loss-of-function polypeptide.

[0080] The present disclosure also provides methods of detecting the presence or absence of an ST6GALNAC5 missense variant genomic nucleic acid molecule encoding an ST6GALNAC5 predicted loss-of-function polypeptide in a biological sample obtained from a subject, and/or an ST6GALNAC5 missense variant mRNA molecule encoding an ST6GALNAC5 predicted loss-of-function polypeptide in a biological sample obtained from a subject, and/or an ST6GALNAC5 missense variant cDNA molecule encoding an ST6GALNAC5 predicted loss-of-function polypeptide produced from an mRNA molecule in a biological sample obtained from a subject. It is understood that gene sequences within a population and mRNA molecules encoded by such genes can vary due to polymorphisms such as single-nucleotide polymorphisms. The sequences provided herein for the ST6GALNAC5 variant genomic nucleic acid molecule, ST6GALNAC5 variant mRNA molecule, and ST6GALNAC5 variant cDNA molecule are only exemplary sequences. Other sequences for the ST6GALNAC5 variant genomic nucleic acid molecule, variant mRNA molecule, and variant cDNA molecule are also possible.

[0081] The biological sample can be derived from any cell, tissue, or biological fluid from the subject. The biological sample may comprise any clinically relevant tissue such as, for example, a bone marrow sample, a tumor biopsy, a fine needle aspirate, or a sample of bodily fluid, such as blood, gingival crevicular fluid, plasma, serum, lymph, ascitic fluid, cystic fluid, or urine. In some embodiments, the biological sample comprises a buccal swab. The biological sample used in the methods disclosed herein can vary based on the assay format, nature of the detection method, and the tissues, cells, or extracts that are used as the sample. A biological sample can be processed differently depending on the assay being employed. For example, when detecting any ST6GALNAC5 variant nucleic acid molecule, preliminary processing designed to isolate or enrich the biological sample for the ST6GALNAC5 variant nucleic acid molecule can be employed. A variety of techniques may be used for this purpose. When detecting the level of any ST6GALNAC5 variant mRNA molecule, different techniques can be used enrich the biological sample with mRNA molecules. Various methods to detect the presence or level of an mRNA molecule or the presence of a particular variant genomic DNA locus can be used.

[0082] The present disclosure also provides methods of detecting an ST6GALNAC5 missense variant nucleic acid molecule, or the complement thereof, encoding an ST6GALNAC5 predicted loss-of-function polypeptide in a subject. The methods comprise assaying a biological sample obtained from the subject to determine whether a nucleic acid molecule in the biological sample is an ST6GALNAC5 missense variant nucleic acid molecule encoding an ST6GALNAC5 predicted loss-of-function polypeptide.

[0083] In some embodiments, the ST6GALNAC5 missense variant nucleic acid molecule encoding the ST6GALNAC5 predicted loss-of-function polypeptide, or the complement thereof, is a genomic nucleic acid molecule having a nucleotide sequence comprising a cytosine at a position corresponding to position 176,867 according to SEQ ID NO:2, or the complement thereof.

[0084] In some embodiments, the ST6GALNAC5 missense variant nucleic acid molecule encoding the ST6GALNAC5 predicted loss-of-function polypeptide, or the complement thereof, is an mRNA molecule having a nucleotide sequence comprising: a cytosine at a position corresponding to position 600 according to SEQ ID NO:11, or the complement thereof; a cytosine at a position corresponding to position 639 according to SEQ ID NO:12, or the complement thereof; a cytosine at a position corresponding to position 562 according to SEQ ID NO:13, or the complement thereof; a cytosine at a position corresponding to position 515 according to SEQ ID NO:14, or the complement thereof; a cytosine at a position corresponding to position 579 according to SEQ ID NO:15, or the complement thereof; a cytosine at a position corresponding to position 416 according to SEQ ID NO:16, or the complement thereof; a cytosine at a position corresponding to position 639 according to SEQ ID NO:17, or the complement thereof; or a cytosine at a position corresponding to position 600 according to SEQ ID NO:18, or the complement thereof.

[0085] In some embodiments, the ST6GALNAC5 missense variant nucleic acid molecule encoding the ST6GALNAC5 predicted loss-of-function polypeptide, or the complement thereof, is a cDNA molecule produced from an mRNA molecule in the biological sample having a nucleotide sequence comprising: a cytosine at a position corresponding to position 600 according to SEQ ID NO:27, or the complement thereof; a cytosine at a position corresponding to position 639 according to SEQ ID NO:28, or the complement thereof; a cytosine at a position corresponding to position 562 according to SEQ ID NO:29, or the complement thereof; a cytosine at a position corresponding to position 515 according to SEQ ID NO:30, or the complement thereof; a cytosine at a position corresponding to position 579 according to SEQ ID NO:31, or the complement thereof; a cytosine at a position corresponding to position 416 according to SEQ ID NO:32, or the complement thereof; a cytosine at a position corresponding to position 639 according to SEQ ID NO:33, or the complement thereof; or a cytosine at a position corresponding to position 600 according to SEQ ID NO:34, or the complement thereof.

[0086] In some embodiments, the ST6GALNAC5 missense variant nucleic acid molecule has a nucleotide sequence comprising: i) a cytosine at a position corresponding to position 176,867 according to SEQ ID NO:2 (for genomic nucleic acid molecules); ii) a cytosine at a position corresponding to position 600 according to SEQ ID NO:11; a cytosine at a position corresponding to position 639 according to SEQ ID NO:12; a cytosine at a position corresponding to position 562 according to SEQ ID NO:13; a cytosine at a position corresponding to position 515 according to SEQ ID NO:14; a cytosine at a position corresponding to position 579 according to SEQ ID NO:15; a cytosine at a position corresponding to position 416 according to SEQ ID NO:16; a cytosine at a position corresponding to position 639 according to SEQ ID NO:17; or a cytosine at a position corresponding to position 600 according to SEQ ID NO:18 (for mRNA molecules); or iii) a cytosine at a position corresponding to position 600 according to SEQ ID NO:27; a cytosine at a position corresponding to position 639 according to SEQ ID NO:28; a cytosine at a position corresponding to position 562 according to SEQ ID NO:29; a cytosine at a position corresponding to position 515 according to SEQ ID NO:30; a cytosine at a position corresponding to position 579 according to SEQ ID NO:31; a cytosine at a position corresponding to position 416 according to SEQ ID NO:32; a cytosine at a position corresponding to position 639 according to SEQ ID NO:33; or a cytosine at a position corresponding to position 600 according to SEQ ID NO:34 (for cDNA molecules obtained from mRNA molecules).

[0087] In some embodiments, the biological sample comprises a cell or cell lysate. Such methods can further comprise, for example, obtaining a biological sample from the subject comprising an ST6GALNAC5 genomic nucleic acid molecule or mRNA molecule, and if mRNA, optionally reverse transcribing the mRNA into cDNA. Such assays can comprise, for example determining the identity of these positions of the particular ST6GALNAC5 nucleic acid molecule. In some embodiments, the method is an in vitro method.

[0088] In some embodiments, the determining step, detecting step, or sequence analysis comprises sequencing at least a portion of the nucleotide sequence of the ST6GALNAC5 genomic nucleic acid molecule, the ST6GALNAC5 mRNA molecule, or the ST6GALNAC5 cDNA molecule produced from the mRNA molecule in the biological sample, wherein the sequenced portion comprises one or more variations that cause a loss-of-function (partial or complete) or are predicted to cause a loss-of-function (partial or complete).

[0089] In some embodiments, the determining step, detecting step, or sequence analysis comprises sequencing at least a portion of: i) the nucleotide sequence of the ST6GALNAC5 genomic nucleic acid molecule in the biological sample, wherein the sequenced portion comprises a position corresponding to position 176,867 according to SEQ ID NO:2, or the complement thereof; ii) the nucleotide sequence of the ST6GALNAC5 mRNA molecule in the biological sample, wherein the sequenced portion comprises a position corresponding to: position 600 according to SEQ ID NO:11, or the complement thereof; position 639 according to SEQ ID NO:12, or the complement thereof; position 562 according to SEQ ID NO:13, or the complement thereof; position 515 according to SEQ ID NO:14, or the complement thereof; position 579 according to SEQ ID NO:15, or the complement thereof; position 416 according to SEQ ID NO:16, or the complement thereof; position 639 according to SEQ ID NO:17, or the complement thereof; or position 600 according to SEQ ID NO:18, or the complement thereof; and/or iii) the nucleotide sequence of the ST6GALNAC5 cDNA molecule produced from the mRNA in the biological sample, wherein the sequenced portion comprises a position corresponding to: position 600 according to SEQ ID NO:27, or the complement thereof; position 639 according to SEQ ID NO:28, or the complement thereof; position 562 according to SEQ ID NO:29, or the complement thereof; position 515 according to SEQ ID NO:30, or the complement thereof; position 579 according to SEQ ID NO:31, or the complement thereof; position 416 according to SEQ ID NO:32, or the complement thereof; position 639 according to SEQ ID NO:33, or the complement thereof; or position 600 according to SEQ ID NO:34, or the complement thereof. When the sequenced portion of the ST6GALNAC5 nucleic acid molecule in the biological sample comprises: a cytosine at a position corresponding to position 176,867 according to SEQ ID NO:2, a cytosine at a position corresponding to position 600 according to SEQ ID NO:11, a cytosine at a position corresponding to position 639 according to SEQ ID NO:12, a cytosine at a position corresponding to position 562 according to SEQ ID NO:13, a cytosine at a position corresponding to position 515 according to SEQ ID NO:14, a cytosine at a position corresponding to position 579 according to SEQ ID NO:15, a cytosine at a position corresponding to position 416 according to SEQ ID NO:16, a cytosine at a position corresponding to position 639 according to SEQ ID NO:17, a cytosine at a position corresponding to position 600 according to SEQ ID NO:18, a cytosine at a position corresponding to position 600 according to SEQ ID NO:27, a cytosine at a position corresponding to position 639 according to SEQ ID NO:28, a cytosine at a position corresponding to position 562 according to SEQ ID NO:29, a cytosine at a position corresponding to position 515 according to SEQ ID NO:30, a cytosine at a position corresponding to position 579 according to SEQ ID NO:31, a cytosine at a position corresponding to position 416 according to SEQ ID NO:32, a cytosine at a position corresponding to position 639 according to SEQ ID NO:33, or a cytosine at a position corresponding to position 600 according to SEQ ID NO:34, then the ST6GALNAC5 nucleic acid molecule in the biological sample is an ST6GALNAC5 missense variant nucleic acid molecule encoding an ST6GALNAC5 predicted loss-of-function polypeptide.

[0090] In some embodiments, the determining step, detecting step, or sequence analysis comprises sequencing at least a portion of the nucleotide sequence of the ST6GALNAC5 genomic nucleic acid molecule in the biological sample, wherein the sequenced portion comprises a position corresponding to position 176,867 according to SEQ ID NO:2, or the complement thereof. When the sequenced portion of the ST6GALNAC5 nucleic acid molecule in the biological sample comprises a cytosine at a position corresponding to position 176,867 according to SEQ ID NO:2, then the ST6GALNAC5 nucleic acid molecule in the biological sample is an ST6GALNAC5 missense variant genomic nucleic acid molecule encoding an ST6GALNAC5 predicted loss-of-function polypeptide.

[0091] In some embodiments, the determining step, detecting step, or sequence analysis comprises sequencing at least a portion of the nucleotide sequence of the ST6GALNAC5 mRNA molecule in the biological sample, wherein the sequenced portion comprises a position corresponding to: position 600 according to SEQ ID NO:11, or the complement thereof; position 639 according to SEQ ID NO:12, or the complement thereof; position 562 according to SEQ ID NO:13, or the complement thereof; position 515 according to SEQ ID NO:14, or the complement thereof; position 579 according to SEQ ID NO:15, or the complement thereof; position 416 according to SEQ ID NO:16, or the complement thereof; position 639 according to SEQ ID NO:17, or the complement thereof; or position 600 according to SEQ ID NO:18, or the complement thereof. When the sequenced portion of the ST6GALNAC5 mRNA molecule in the biological sample comprises: a cytosine at a position corresponding to position 600 according to SEQ ID NO:11, a cytosine at a position corresponding to position 639 according to SEQ ID NO:12, a cytosine at a position corresponding to position 562 according to SEQ ID NO:13, a cytosine at a position corresponding to position 515 according to SEQ ID NO:14, a cytosine at a position corresponding to position 579 according to SEQ ID NO:15, a cytosine at a position corresponding to position 416 according to SEQ ID NO:16, a cytosine at a position corresponding to position 639 according to SEQ ID NO:17, or a cytosine at a position corresponding to position 600 according to SEQ ID NO:18, then the ST6GALNAC5 nucleic acid molecule in the biological sample is an ST6GALNAC5 missense variant mRNA molecule encoding an ST6GALNAC5 predicted loss-of-function polypeptide.

[0092] In some embodiments, the determining step, detecting step, or sequence analysis comprises sequencing at least a portion of the nucleotide sequence of the ST6GALNAC5 cDNA molecule produced from the mRNA molecule in the biological sample, wherein the sequenced portion comprises a position corresponding to: position 600 according to SEQ ID NO:27, or the complement thereof; position 639 according to SEQ ID NO:28, or the complement thereof; position 562 according to SEQ ID NO:29, or the complement thereof; position 515 according to SEQ ID NO:30, or the complement thereof; position 579 according to SEQ ID NO:31, or the complement thereof; position 416 according to SEQ ID NO:32, or the complement thereof; position 639 according to SEQ ID NO:33, or the complement thereof; or position 600 according to SEQ ID NO:34, or the complement thereof. When the sequenced portion of the ST6GALNAC5 cDNA molecule in the biological sample comprises: a cytosine at a position corresponding to position 600 according to SEQ ID NO:27, a cytosine at a position corresponding to position 639 according to SEQ ID NO:28, a cytosine at a position corresponding to position 562 according to SEQ ID NO:29, a cytosine at a position corresponding to position 515 according to SEQ ID NO:30, a cytosine at a position corresponding to position 579 according to SEQ ID NO:31, a cytosine at a position corresponding to position 416 according to SEQ ID NO:32, a cytosine at a position corresponding to position 639 according to SEQ ID NO:33, or a cytosine at a position corresponding to position 600 according to SEQ ID NO:34, then the ST6GALNAC5 nucleic acid molecule in the biological sample is an ST6GALNAC5 missense variant cDNA molecule encoding an ST6GALNAC5 predicted loss-of-function polypeptide.

[0093] In some embodiments, the determining step, detecting step, or sequence analysis comprises: a) contacting the biological sample with a primer hybridizing to a portion of the nucleotide sequence of the ST6GALNAC5: i) genomic nucleic acid molecule, or the complement thereof, that is proximate to a position corresponding to position 176,867 according to SEQ ID NO:2, or the complement thereof; ii) mRNA molecule, or the complement thereof, that is proximate to a position corresponding to: position 600 according to SEQ ID NO:11, or the complement thereof; position 639 according to SEQ ID NO:12, or the complement thereof; position 562 according to SEQ ID NO:13, or the complement thereof; position 515 according to SEQ ID NO:14, or the complement thereof; position 579 according to SEQ ID NO:15, or the complement thereof; position 416 according to SEQ ID NO:16, or the complement thereof; position 639 according to SEQ ID NO:17, or the complement thereof; or position 600 according to SEQ ID NO:18, or the complement thereof; and/or iii) cDNA molecule, or the complement thereof, that is proximate to a position corresponding to: position 600 according to SEQ ID NO:27, or the complement thereof; position 639 according to SEQ ID NO:28, or the complement thereof; position 562 according to SEQ ID NO:29, or the complement thereof; position 515 according to SEQ ID NO:30, or the complement thereof; position 579 according to SEQ ID NO:31, or the complement thereof; position 416 according to SEQ ID NO:32, or the complement thereof; position 639 according to SEQ ID NO:33, or the complement thereof; or position 600 according to SEQ ID NO:34, or the complement thereof; b) extending the primer at least through the position of the nucleotide sequence of the ST6GALNAC5: i) genomic nucleic acid molecule, or the complement thereof, corresponding to position 176,867 according to SEQ ID NO:2, or the complement thereof; ii) mRNA molecule, or the complement thereof, corresponding to: position 600 according to SEQ ID NO:11, or the complement thereof; position 639 according to SEQ ID NO:12, or the complement thereof; position 562 according to SEQ ID NO:13, or the complement thereof; position 515 according to SEQ ID NO:14, or the complement thereof; position 579 according to SEQ ID NO:15, or the complement thereof; position 416 according to SEQ ID NO:16, or the complement thereof; position 639 according to SEQ ID NO:17, or the complement thereof; or position 600 according to SEQ ID NO:18, or the complement thereof; and/or iii) cDNA molecule, or the complement thereof, corresponding to: position 600 according to SEQ ID NO:27, or the complement thereof; position 639 according to SEQ ID NO:28, or the complement thereof; position 562 according to SEQ ID NO:29, or the complement thereof; position 515 according to SEQ ID NO:30, or the complement thereof; position 579 according to SEQ ID NO:31, or the complement thereof; position 416 according to SEQ ID NO:32, or the complement thereof; position 639 according to SEQ ID NO:33, or the complement thereof; or position 600 according to SEQ ID NO:34, or the complement thereof; and c) determining whether the extension product of the primer comprises: a cytosine at a position corresponding to position 176,867 according to SEQ ID NO:2, or the complement thereof; a cytosine at a position corresponding to position 600 according to SEQ ID NO:11, or the complement thereof; a cytosine at a position corresponding to position 639 according to SEQ ID NO:12, or the complement thereof; a cytosine at a position corresponding to position 562 according to SEQ ID NO:13, or the complement thereof; a cytosine at a position corresponding to position 515 according to SEQ ID NO:14, or the complement thereof; a cytosine at a position corresponding to position 579 according to SEQ ID NO:15, or the complement thereof; a cytosine at a position corresponding to position 416 according to SEQ ID NO:16, or the complement thereof; a cytosine at a position corresponding to position 639 according to SEQ ID NO:17, or the complement thereof; a cytosine at a position corresponding to position 600 according to SEQ ID NO:18, or the complement thereof; a cytosine at a position corresponding to position 600 according to SEQ ID NO:27, or the complement thereof; a cytosine at a position corresponding to position 639 according to SEQ ID NO:28, or the complement thereof; a cytosine at a position corresponding to position 562 according to SEQ ID NO:29, or the complement thereof; a cytosine at a position corresponding to position 515 according to SEQ ID NO:30, or the complement thereof; a cytosine at a position corresponding to position 579 according to SEQ ID NO:31, or the complement thereof; a cytosine at a position corresponding to position 416 according to SEQ ID NO:32, or the complement thereof; a cytosine at a position corresponding to position 639 according to SEQ ID NO:33, or the complement thereof; or a cytosine at a position corresponding to position 600 according to SEQ ID NO:34, or the complement thereof.

[0094] In some embodiments, the determining step, detecting step, or sequence analysis comprises: a) contacting the biological sample with a primer hybridizing to a portion of the nucleotide sequence of the ST6GALNAC5 genomic nucleic acid molecule, or the complement thereof, that is proximate to a position corresponding to position 176,867 according to SEQ ID NO:2, or the complement thereof; b) extending the primer at least through the position of the nucleotide sequence of the ST6GALNAC5 genomic nucleic acid molecule, or the complement thereof, corresponding to position 176,867 according to SEQ ID NO:2, or the complement thereof; and c) determining whether the extension product of the primer comprises a cytosine at a position corresponding to position 176,867 according to SEQ ID NO:2, or the complement thereof.

[0095] In some embodiments, the determining step, detecting step, or sequence analysis comprises: a) contacting the biological sample with a primer hybridizing to a portion of the nucleotide sequence of the ST6GALNAC5 mRNA molecule, or the complement thereof, that is proximate to a position corresponding to: position 600 according to SEQ ID NO:11, or the complement thereof; position 639 according to SEQ ID NO:12, or the complement thereof; position 562 according to SEQ ID NO:13, or the complement thereof; position 515 according to SEQ ID NO:14, or the complement thereof; position 579 according to SEQ ID NO:15, or the complement thereof; position 416 according to SEQ ID NO:16, or the complement thereof; position 639 according to SEQ ID NO:17, or the complement thereof; or position 600 according to SEQ ID NO:18, or the complement thereof; b) extending the primer at least through the position of the nucleotide sequence of the ST6GALNAC5 mRNA molecule corresponding to: position 600 according to SEQ ID NO:11, or the complement thereof; position 639 according to SEQ ID NO:12, or the complement thereof; position 562 according to SEQ ID NO:13, or the complement thereof; position 515 according to SEQ ID NO:14, or the complement thereof; position 579 according to SEQ ID NO:15, or the complement thereof; position 416 according to SEQ ID NO:16, or the complement thereof; position 639 according to SEQ ID NO:17, or the complement thereof; or position 600 according to SEQ ID NO:18, or the complement thereof; and c) determining whether the extension product of the primer comprises: a cytosine at a position corresponding to position 600 according to SEQ ID NO:11, or the complement thereof; a cytosine at a position corresponding to position 639 according to SEQ ID NO:12, or the complement thereof; a cytosine at a position corresponding to position 562 according to SEQ ID NO:13, or the complement thereof; a cytosine at a position corresponding to position 515 according to SEQ ID NO:14, or the complement thereof; a cytosine at a position corresponding to position 579 according to SEQ ID NO:15, or the complement thereof; a cytosine at a position corresponding to position 416 according to SEQ ID NO:16, or the complement thereof; a cytosine at a position corresponding to position 639 according to SEQ ID NO:17, or the complement thereof; or a cytosine at a position corresponding to position 600 according to SEQ ID NO:18, or the complement thereof.

[0096] In some embodiments, the determining step, detecting step, or sequence analysis comprises: a) contacting the biological sample with a primer hybridizing to a portion of the nucleotide sequence of the ST6GALNAC5 cDNA molecule, or the complement thereof, that is proximate to a position corresponding to: position 600 according to SEQ ID NO:27, or the complement thereof; position 639 according to SEQ ID NO:28, or the complement thereof; position 562 according to SEQ ID NO:29, or the complement thereof; position 515 according to SEQ ID NO:30, or the complement thereof; position 579 according to SEQ ID NO:31, or the complement thereof; position 416 according to SEQ ID NO:32, or the complement thereof; position 639 according to SEQ ID NO:33, or the complement thereof; or position 600 according to SEQ ID NO:34, or the complement thereof; b) extending the primer at least through the position of the nucleotide sequence of the ST6GALNAC5 cDNA molecule corresponding to: position 600 according to SEQ ID NO:27, or the complement thereof; position 639 according to SEQ ID NO:28, or the complement thereof; position 562 according to SEQ ID NO:29, or the complement thereof; position 515 according to SEQ ID NO:30, or the complement thereof; position 579 according to SEQ ID NO:31, or the complement thereof; position 416 according to SEQ ID NO:32, or the complement thereof; position 639 according to SEQ ID NO:33, or the complement thereof; or position 600 according to SEQ ID NO:34, or the complement thereof; and c) determining whether the extension product of the primer comprises: a cytosine at a position corresponding to position 600 according to SEQ ID NO:27, or the complement thereof; a cytosine at a position corresponding to position 639 according to SEQ ID NO:28, or the complement thereof; a cytosine at a position corresponding to position 562 according to SEQ ID NO:29, or the complement thereof; a cytosine at a position corresponding to position 515 according to SEQ ID NO:30, or the complement thereof; a cytosine at a position corresponding to position 579 according to SEQ ID NO:31, or the complement thereof; a cytosine at a position corresponding to position 416 according to SEQ ID NO:32, or the complement thereof; a cytosine at a position corresponding to position 639 according to SEQ ID NO:33, or the complement thereof; or a cytosine at a position corresponding to position 600 according to SEQ ID NO:34, or the complement thereof.

[0097] In some embodiments, the entire nucleic acid molecule is sequenced. In some embodiments, only an ST6GALNAC5 genomic nucleic acid molecule is analyzed. In some embodiments, only an ST6GALNAC5 mRNA is analyzed. In some embodiments, only an ST6GALNAC5 cDNA obtained from ST6GALNAC5 mRNA is analyzed.

[0098] In some embodiments, the determining step, detecting step, or sequence analysis comprises: a) amplifying at least a portion of the ST6GALNAC5 nucleic acid molecule, or the complement thereof, in the biological sample, wherein the amplified portion comprises: a cytosine at a position corresponding to position 176,867 according to SEQ ID NO:2, or the complement thereof; a cytosine at a position corresponding to position 600 according to SEQ ID NO:11, or the complement thereof; a cytosine at a position corresponding to position 639 according to SEQ ID NO:12, or the complement thereof; a cytosine at a position corresponding to position 562 according to SEQ ID NO:13, or the complement thereof; a cytosine at a position corresponding to position 515 according to SEQ ID NO:14, or the complement thereof; a cytosine at a position corresponding to position 579 according to SEQ ID NO:15, or the complement thereof; a cytosine at a position corresponding to position 416 according to SEQ ID NO:16, or the complement thereof; a cytosine at a position corresponding to position 639 according to SEQ ID NO:17, or the complement thereof; a cytosine at a position corresponding to position 600 according to SEQ ID NO:18, or the complement thereof; a cytosine at a position corresponding to position 600 according to SEQ ID NO:27, or the complement thereof; a cytosine at a position corresponding to position 639 according to SEQ ID NO:28, or the complement thereof; a cytosine at a position corresponding to position 562 according to SEQ ID NO:29, or the complement thereof; a cytosine at a position corresponding to position 515 according to SEQ ID NO:30, or the complement thereof; a cytosine at a position corresponding to position 579 according to SEQ ID NO:31, or the complement thereof; a cytosine at a position corresponding to position 416 according to SEQ ID NO:32, or the complement thereof; a cytosine at a position corresponding to position 639 according to SEQ ID NO:33, or the complement thereof; or a cytosine at a position corresponding to position 600 according to SEQ ID NO:34, or the complement thereof; b) labeling the amplified nucleic acid molecule with a detectable label; c) contacting the labeled nucleic acid molecule with a support comprising an alteration-specific probe, wherein the alteration-specific probe comprises a nucleotide sequence which hybridizes under stringent conditions to the nucleic acid sequence of the amplified nucleic acid molecule comprising: a cytosine at a position corresponding to position 176,867 according to SEQ ID NO:2, or the complement thereof; a cytosine at a position corresponding to position 600 according to SEQ ID NO:11, or the complement thereof; a cytosine at a position corresponding to position 639 according to SEQ ID NO:12, or the complement thereof; a cytosine at a position corresponding to position 562 according to SEQ ID NO:13, or the complement thereof; a cytosine at a position corresponding to position 515 according to SEQ ID NO:14, or the complement thereof; a cytosine at a position corresponding to position 579 according to SEQ ID NO:15, or the complement thereof; a cytosine at a position corresponding to position 416 according to SEQ ID NO:16, or the complement thereof; a cytosine at a position corresponding to position 639 according to SEQ ID NO:17, or the complement thereof; a cytosine at a position corresponding to position 600 according to SEQ ID NO:18, or the complement thereof; a cytosine at a position corresponding to position 600 according to SEQ ID NO:27, or the complement thereof; a cytosine at a position corresponding to position 639 according to SEQ ID NO:28, or the complement thereof; a cytosine at a position corresponding to position 562 according to SEQ ID NO:29, or the complement thereof; a cytosine at a position corresponding to position 515 according to SEQ ID NO:30, or the complement thereof; a cytosine at a position corresponding to position 579 according to SEQ ID NO:31, or the complement thereof; a cytosine at a position corresponding to position 416 according to SEQ ID NO:32, or the complement thereof; a cytosine at a position corresponding to position 639 according to SEQ ID NO:33, or the complement thereof; or a cytosine at a position corresponding to position 600 according to SEQ ID NO:34, or the complement thereof; and d) detecting the detectable label.

[0099] In some embodiments, the determining step, detecting step, or sequence analysis comprises: a) amplifying at least a portion of the ST6GALNAC5 genomic nucleic acid molecule, or the complement thereof, in the biological sample, wherein the portion comprises a cytosine at a position corresponding to position 176,867 according to SEQ ID NO:2, or the complement thereof; b) labeling the amplified nucleic acid molecule with a detectable label; c) contacting the labeled nucleic acid molecule with a support comprising an alteration-specific probe, wherein the alteration-specific probe comprises a nucleotide sequence which hybridizes under stringent conditions to the nucleic acid sequence of the amplified nucleic acid molecule comprising a cytosine at a position corresponding to position 176,867 according to SEQ ID NO:2, or the complement thereof; and d) detecting the detectable label.

[0100] In some embodiments, the determining step, detecting step, or sequence analysis comprises: a) amplifying at least a portion of the ST6GALNAC5 mRNA molecule, or the complement thereof, in the biological sample, wherein the portion comprises: a cytosine at a position corresponding to position 600 according to SEQ ID NO:11, or the complement thereof; a cytosine at a position corresponding to position 639 according to SEQ ID NO:12, or the complement thereof; a cytosine at a position corresponding to position 562 according to SEQ ID NO:13, or the complement thereof; a cytosine at a position corresponding to position 515 according to SEQ ID NO:14, or the complement thereof; a cytosine at a position corresponding to position 579 according to SEQ ID NO:15, or the complement thereof; a cytosine at a position corresponding to position 416 according to SEQ ID NO:16, or the complement thereof; a cytosine at a position corresponding to position 639 according to SEQ ID NO:17, or the complement thereof; or a cytosine at a position corresponding to position 600 according to SEQ ID NO:18, or the complement thereof; b) labeling the amplified nucleic acid molecule with a detectable label; c) contacting the labeled nucleic acid molecule with a support comprising an alteration-specific probe, wherein the alteration-specific probe comprises a nucleotide sequence which hybridizes under stringent conditions to the nucleic acid sequence of the amplified nucleic acid molecule comprising: a cytosine at a position corresponding to position 600 according to SEQ ID NO:11, or the complement thereof; a cytosine at a position corresponding to position 639 according to SEQ ID NO:12, or the complement thereof; a cytosine at a position corresponding to position 562 according to SEQ ID NO:13, or the complement thereof; a cytosine at a position corresponding to position 515 according to SEQ ID NO:14, or the complement thereof; a cytosine at a position corresponding to position 579 according to SEQ ID NO:15, or the complement thereof; a cytosine at a position corresponding to position 416 according to SEQ ID NO:16, or the complement thereof; a cytosine at a position corresponding to position 639 according to SEQ ID NO:17, or the complement thereof; or a cytosine at a position corresponding to position 600 according to SEQ ID NO:18, or the complement thereof; and d) detecting the detectable label.

[0101] In some embodiments, the determining step, detecting step, or sequence analysis comprises: a) amplifying at least a portion of the ST6GALNAC5 cDNA molecule, or the complement thereof, in the biological sample, wherein the portion comprises: a cytosine at a position corresponding to position 600 according to SEQ ID NO:27, or the complement thereof; a cytosine at a position corresponding to position 639 according to SEQ ID NO:28, or the complement thereof; a cytosine at a position corresponding to position 562 according to SEQ ID NO:29, or the complement thereof; a cytosine at a position corresponding to position 515 according to SEQ ID NO:30, or the complement thereof; a cytosine at a position corresponding to position 579 according to SEQ ID NO:31, or the complement thereof; a cytosine at a position corresponding to position 416 according to SEQ ID NO:32, or the complement thereof; a cytosine at a position corresponding to position 639 according to SEQ ID NO:33, or the complement thereof; or a cytosine at a position corresponding to position 600 according to SEQ ID NO:34, or the complement thereof; b) labeling the amplified nucleic acid molecule with a detectable label; c) contacting the labeled nucleic acid molecule with a support comprising an alteration-specific probe, wherein the alteration-specific probe comprises a nucleotide sequence which hybridizes under stringent conditions to the nucleic acid sequence of the amplified nucleic acid molecule comprising: a cytosine at a position corresponding to position 600 according to SEQ ID NO:27, or the complement thereof; a cytosine at a position corresponding to position 639 according to SEQ ID NO:28, or the complement thereof; a cytosine at a position corresponding to position 562 according to SEQ ID NO:29, or the complement thereof; a cytosine at a position corresponding to position 515 according to SEQ ID NO:30, or the complement thereof; a cytosine at a position corresponding to position 579 according to SEQ ID NO:31, or the complement thereof; a cytosine at a position corresponding to position 416 according to SEQ ID NO:32, or the complement thereof; a cytosine at a position corresponding to position 639 according to SEQ ID NO:33, or the complement thereof; or a cytosine at a position corresponding to position 600 according to SEQ ID NO:34, or the complement thereof; and d) detecting the detectable label.

[0102] In some embodiments, the nucleic acid molecule is mRNA and the determining step further comprises reverse-transcribing the mRNA into a cDNA prior to the amplifying step.

[0103] In some embodiments, the determining step, detecting step, or sequence analysis comprises: contacting the ST6GALNAC5 nucleic acid molecule, or the complement thereof, in the biological sample with an alteration-specific probe comprising a detectable label, wherein the alteration-specific probe comprises a nucleotide sequence which hybridizes under stringent conditions to the nucleotide sequence of the ST6GALNAC5 nucleic acid molecule, or the complement thereof, comprising: a cytosine at a position corresponding to position 176,867 according to SEQ ID NO:2, or the complement thereof; a cytosine at a position corresponding to position 600 according to SEQ ID NO:11, or the complement thereof; a cytosine at a position corresponding to position 639 according to SEQ ID NO:12, or the complement thereof; a cytosine at a position corresponding to position 562 according to SEQ ID NO:13, or the complement thereof; a cytosine at a position corresponding to position 515 according to SEQ ID NO:14, or the complement thereof; a cytosine at a position corresponding to position 579 according to SEQ ID NO:15, or the complement thereof; a cytosine at a position corresponding to position 416 according to SEQ ID NO:16, or the complement thereof; a cytosine at a position corresponding to position 639 according to SEQ ID NO:17, or the complement thereof; a cytosine at a position corresponding to position 600 according to SEQ ID NO:18, or the complement thereof; a cytosine at a position corresponding to position 600 according to SEQ ID NO:27, or the complement thereof; a cytosine at a position corresponding to position 639 according to SEQ ID NO:28, or the complement thereof; a cytosine at a position corresponding to position 562 according to SEQ ID NO:29, or the complement thereof; a cytosine at a position corresponding to position 515 according to SEQ ID NO:30, or the complement thereof; a cytosine at a position corresponding to position 579 according to SEQ ID NO:31, or the complement thereof; a cytosine at a position corresponding to position 416 according to SEQ ID NO:32, or the complement thereof; a cytosine at a position corresponding to position 639 according to SEQ ID NO:33, or the complement thereof; or a cytosine at a position corresponding to position 600 according to SEQ ID NO:34, or the complement thereof; and detecting the detectable label.

[0104] In some embodiments, the determining step, detecting step, or sequence analysis comprises: contacting the ST6GALNAC5 genomic nucleic acid molecule, or the complement thereof, in the biological sample with an alteration-specific probe comprising a detectable label, wherein the alteration-specific probe comprises a nucleotide sequence which hybridizes under stringent conditions to the nucleotide sequence of the ST6GALNAC5 genomic nucleic acid molecule, or the complement thereof, comprising a cytosine at a position corresponding to position 176,867 according to SEQ ID NO:2, or the complement thereof; and detecting the detectable label.

[0105] In some embodiments, the determining step, detecting step, or sequence analysis comprises: contacting the ST6GALNAC5 mRNA molecule, or the complement thereof, in the biological sample with an alteration-specific probe comprising a detectable label, wherein the alteration-specific probe comprises a nucleotide sequence which hybridizes under stringent conditions to the nucleotide sequence of the ST6GALNAC5 mRNA molecule, or the complement thereof, comprising: a cytosine at a position corresponding to position 600 according to SEQ ID NO:11, or the complement thereof; a cytosine at a position corresponding to position 639 according to SEQ ID NO:12, or the complement thereof; a cytosine at a position corresponding to position 562 according to SEQ ID NO:13, or the complement thereof; a cytosine at a position corresponding to position 515 according to SEQ ID NO:14, or the complement thereof; a cytosine at a position corresponding to position 579 according to SEQ ID NO:15, or the complement thereof; a cytosine at a position corresponding to position 416 according to SEQ ID NO:16, or the complement thereof; a cytosine at a position corresponding to position 639 according to SEQ ID NO:17, or the complement thereof; or a cytosine at a position corresponding to position 600 according to SEQ ID NO:18, or the complement thereof; and detecting the detectable label.

[0106] In some embodiments, the determining step, detecting step, or sequence analysis comprises: contacting the ST6GALNAC5 cDNA molecule, or the complement thereof, produced from an mRNA molecule in the biological sample with an alteration-specific probe comprising a detectable label, wherein the alteration-specific probe comprises a nucleotide sequence which hybridizes under stringent conditions to the nucleotide sequence of the ST6GALNAC5 cDNA molecule, or the complement thereof, comprising: a cytosine at a position corresponding to position 600 according to SEQ ID NO:27, or the complement thereof; a cytosine at a position corresponding to position 639 according to SEQ ID NO:28, or the complement thereof; a cytosine at a position corresponding to position 562 according to SEQ ID NO:29, or the complement thereof; a cytosine at a position corresponding to position 515 according to SEQ ID NO:30, or the complement thereof; a cytosine at a position corresponding to position 579 according to SEQ ID NO:31, or the complement thereof; a cytosine at a position corresponding to position 416 according to SEQ ID NO:32, or the complement thereof; a cytosine at a position corresponding to position 639 according to SEQ ID NO:33, or the complement thereof; or a cytosine at a position corresponding to position 600 according to SEQ ID NO:34, or the complement thereof; and detecting the detectable label.

[0107] In some embodiments, the ST6GALNAC5 nucleic acid molecule is present within a cell obtained from the subject.

[0108] Alteration-specific polymerase chain reaction techniques can be used to detect mutations such as SNPs in a nucleic acid sequence. Alteration-specific primers can be used because the DNA polymerase will not extend when a mismatch with the template is present.

[0109] In some embodiments, the determining step, detecting step, or sequence analysis comprises contacting the biological sample with a primer or probe, such as an alteration-specific primer or alteration-specific probe, that specifically hybridizes to an ST6GALNAC5 variant genomic sequence, variant mRNA sequence, or variant cDNA sequence and not the corresponding ST6GALNAC5 reference sequence under stringent conditions, and determining whether hybridization has occurred.

[0110] In some embodiments, the assay comprises RNA sequencing (RNA-Seq). In some embodiments, the assays also comprise reverse transcribing mRNA into cDNA, such as by the reverse transcriptase polymerase chain reaction (RT-PCR).

[0111] In some embodiments, the methods utilize probes and primers of sufficient nucleotide length to bind to the target nucleotide sequence and specifically detect and/or identify a polynucleotide comprising an ST6GALNAC5 variant genomic nucleic acid molecule, variant mRNA molecule, or variant cDNA molecule. The hybridization conditions or reaction conditions can be determined by the operator to achieve this result. The nucleotide length may be any length that is sufficient for use in a detection method of choice, including any assay described or exemplified herein. Such probes and primers can hybridize specifically to a target nucleotide sequence under high stringency hybridization conditions. Probes and primers may have complete nucleotide sequence identity of contiguous nucleotides within the target nucleotide sequence, although probes differing from the target nucleotide sequence and that retain the ability to specifically detect and/or identify a target nucleotide sequence may be designed by conventional methods. Probes and primers can have about 80%, about 85%, about 90%, about 91%, about 92%, about 93%, about 94%, about 95%, about 96%, about 97%, about 98%, about 99%, or 100% sequence identity or complementarity with the nucleotide sequence of the target nucleic acid molecule.

[0112] In some embodiments, to determine whether an ST6GALNAC5 nucleic acid molecule (genomic nucleic acid molecule, mRNA molecule, or cDNA molecule), or complement thereof, within a biological sample comprises a nucleotide sequence comprising a cytosine at a position corresponding to position 176,867 according to SEQ ID NO:2, a cytosine at a position corresponding to position 600 according to SEQ ID NO:11, a cytosine at a position corresponding to position 639 according to SEQ ID NO:12, a cytosine at a position corresponding to position 562 according to SEQ ID NO:13, a cytosine at a position corresponding to position 515 according to SEQ ID NO:14, a cytosine at a position corresponding to position 579 according to SEQ ID NO:15, a cytosine at a position corresponding to position 416 according to SEQ ID NO:16, a cytosine at a position corresponding to position 639 according to SEQ ID NO:17, a cytosine at a position corresponding to position 600 according to SEQ ID NO:18, a cytosine at a position corresponding to position 600 according to SEQ ID NO:27, a cytosine at a position corresponding to position 639 according to SEQ ID NO:28, a cytosine at a position corresponding to position 562 according to SEQ ID NO:29, a cytosine at a position corresponding to position 515 according to SEQ ID NO:30, a cytosine at a position corresponding to position 579 according to SEQ ID NO:31, a cytosine at a position corresponding to position 416 according to SEQ ID NO:32, a cytosine at a position corresponding to position 639 according to SEQ ID NO:33, or a cytosine at a position corresponding to position 600 according to SEQ ID NO:34, the biological sample can be subjected to an amplification method using a primer pair that includes a first primer derived from the 5′ flanking sequence adjacent to a cytosine at a position corresponding to position 176,867 according to SEQ ID NO:2, a cytosine at a position corresponding to position 600 according to SEQ ID NO:11, a cytosine at a position corresponding to position 639 according to SEQ ID NO:12, a cytosine at a position corresponding to position 562 according to SEQ ID NO:13, a cytosine at a position corresponding to position 515 according to SEQ ID NO:14, a cytosine at a position corresponding to position 579 according to SEQ ID NO:15, a cytosine at a position corresponding to position 416 according to SEQ ID NO:16, a cytosine at a position corresponding to position 639 according to SEQ ID NO:17, a cytosine at a position corresponding to position 600 according to SEQ ID NO:18, a cytosine at a position corresponding to position 600 according to SEQ ID NO:27, a cytosine at a position corresponding to position 639 according to SEQ ID NO:28, a cytosine at a position corresponding to position 562 according to SEQ ID NO:29, a cytosine at a position corresponding to position 515 according to SEQ ID NO:30, a cytosine at a position corresponding to position 579 according to SEQ ID NO:31, a cytosine at a position corresponding to position 416 according to SEQ ID NO:32, a cytosine at a position corresponding to position 639 according to SEQ ID NO:33, or a cytosine at a position corresponding to position 600 according to SEQ ID NO:34, and a second primer derived from the 3′ flanking sequence adjacent to a cytosine at a position corresponding to position 176,867 according to SEQ ID NO:2, a cytosine at a position corresponding to position 600 according to SEQ ID NO:11, a cytosine at a position corresponding to position 639 according to SEQ ID NO:12, a cytosine at a position corresponding to position 562 according to SEQ ID NO:13, a cytosine at a position corresponding to position 515 according to SEQ ID NO:14, a cytosine at a position corresponding to position 579 according to SEQ ID NO:15, a cytosine at a position corresponding to position 416 according to SEQ ID NO:16, a cytosine at a position corresponding to position 639 according to SEQ ID NO:17, a cytosine at a position corresponding to position 600 according to SEQ ID NO:18, a cytosine at a position corresponding to position 600 according to SEQ ID NO:27, a cytosine at a position corresponding to position 639 according to SEQ ID NO:28, a cytosine at a position corresponding to position 562 according to SEQ ID NO:29, a cytosine at a position corresponding to position 515 according to SEQ ID NO:30, a cytosine at a position corresponding to position 579 according to SEQ ID NO:31, a cytosine at a position corresponding to position 416 according to SEQ ID NO:32, a cytosine at a position corresponding to position 639 according to SEQ ID NO:33, or a cytosine at a position corresponding to position 600 according to SEQ ID NO:34 to produce an amplicon that is indicative of the presence of the SNP at positions encoding a cytosine at a position corresponding to position 176,867 according to SEQ ID NO:2, a cytosine at a position corresponding to position 600 according to SEQ ID NO:11, a cytosine at a position corresponding to position 639 according to SEQ ID NO:12, a cytosine at a position corresponding to position 562 according to SEQ ID NO:13, a cytosine at a position corresponding to position 515 according to SEQ ID NO:14, a cytosine at a position corresponding to position 579 according to SEQ ID NO:15, a cytosine at a position corresponding to position 416 according to SEQ ID NO:16, a cytosine at a position corresponding to position 639 according to SEQ ID NO:17, a cytosine at a position corresponding to position 600 according to SEQ ID NO:18, a cytosine at a position corresponding to position 600 according to SEQ ID NO:27, a cytosine at a position corresponding to position 639 according to SEQ ID NO:28, a cytosine at a position corresponding to position 562 according to SEQ ID NO:29, a cytosine at a position corresponding to position 515 according to SEQ ID NO:30, a cytosine at a position corresponding to position 579 according to SEQ ID NO:31, a cytosine at a position corresponding to position 416 according to SEQ ID NO:32, a cytosine at a position corresponding to position 639 according to SEQ ID NO:33, or a cytosine at a position corresponding to position 600 according to SEQ ID NO:34. In some embodiments, the amplicon may range in length from the combined length of the primer pairs plus one nucleotide base pair to any length of amplicon producible by a DNA amplification protocol. This distance can range from one nucleotide base pair up to the limits of the amplification reaction, or about twenty thousand nucleotide base pairs. Optionally, the primer pair flanks a region including positions comprising a cytosine at a position corresponding to position 176,867 according to SEQ ID NO:2, a cytosine at a position corresponding to position 600 according to SEQ ID NO:11, a cytosine at a position corresponding to position 639 according to SEQ ID NO:12, a cytosine at a position corresponding to position 562 according to SEQ ID NO:13, a cytosine at a position corresponding to position 515 according to SEQ ID NO:14, a cytosine at a position corresponding to position 579 according to SEQ ID NO:15, a cytosine at a position corresponding to position 416 according to SEQ ID NO:16, a cytosine at a position corresponding to position 639 according to SEQ ID NO:17, a cytosine at a position corresponding to position 600 according to SEQ ID NO:18, a cytosine at a position corresponding to position 600 according to SEQ ID NO:27, a cytosine at a position corresponding to position 639 according to SEQ ID NO:28, a cytosine at a position corresponding to position 562 according to SEQ ID NO:29, a cytosine at a position corresponding to position 515 according to SEQ ID NO:30, a cytosine at a position corresponding to position 579 according to SEQ ID NO:31, a cytosine at a position corresponding to position 416 according to SEQ ID NO:32, a cytosine at a position corresponding to position 639 according to SEQ ID NO:33, or a cytosine at a position corresponding to position 600 according to SEQ ID NO:34 and at least 1, 2, 3, 4, 5, 6, 7, 8, 9, 10, or more nucleotides on each side of positions comprising a cytosine at a position corresponding to position 176,867 according to SEQ ID NO:2, a cytosine at a position corresponding to position 600 according to SEQ ID NO:11, a cytosine at a position corresponding to position 639 according to SEQ ID NO:12, a cytosine at a position corresponding to position 562 according to SEQ ID NO:13, a cytosine at a position corresponding to position 515 according to SEQ ID NO:14, a cytosine at a position corresponding to position 579 according to SEQ ID NO:15, a cytosine at a position corresponding to position 416 according to SEQ ID NO:16, a cytosine at a position corresponding to position 639 according to SEQ ID NO:17, a cytosine at a position corresponding to position 600 according to SEQ ID NO:18, a cytosine at a position corresponding to position 600 according to SEQ ID NO:27, a cytosine at a position corresponding to position 639 according to SEQ ID NO:28, a cytosine at a position corresponding to position 562 according to SEQ ID NO:29, a cytosine at a position corresponding to position 515 according to SEQ ID NO:30, a cytosine at a position corresponding to position 579 according to SEQ ID NO:31, a cytosine at a position corresponding to position 416 according to SEQ ID NO:32, a cytosine at a position corresponding to position 639 according to SEQ ID NO:33, or a cytosine at a position corresponding to position 600 according to SEQ ID NO:34.

[0113] Similar amplicons can be generated from the mRNA and/or cDNA sequences. PCR primer pairs can be derived from a known sequence, for example, by using computer programs intended for that purpose, such as the PCR primer analysis tool in Vector NTI version 10 (Informax Inc., Bethesda Md.); PrimerSelect (DNASTAR Inc., Madison, Wis.); and Primer3 (Version 0.4.0.COPYRGT., 1991, Whitehead Institute for Biomedical Research, Cambridge, Mass.). Additionally, the sequence can be visually scanned and primers manually identified using known guidelines.

[0114] Illustrative examples of nucleic acid sequencing techniques include, but are not limited to, chain terminator (Sanger) sequencing and dye terminator sequencing. Other methods involve nucleic acid hybridization methods other than sequencing, including using labeled primers or probes directed against purified DNA, amplified DNA, and fixed cell preparations (fluorescence in situ hybridization (FISH)). In some methods, a target nucleic acid molecule may be amplified prior to or simultaneous with detection. Illustrative examples of nucleic acid amplification techniques include, but are not limited to, polymerase chain reaction (PCR), ligase chain reaction (LCR), strand displacement amplification (SDA), and nucleic acid sequence based amplification (NASBA). Other methods include, but are not limited to, ligase chain reaction, strand displacement amplification, and thermophilic SDA (tSDA).

[0115] In hybridization techniques, stringent conditions can be employed such that a probe or primer will specifically hybridize to its target. In some embodiments, a polynucleotide primer or probe under stringent conditions will hybridize to its target sequence to a detectably greater degree than to other non-target sequences, such as, at least 2-fold, at least 3-fold, at least 4-fold, or more over background, including over 10-fold over background. In some embodiments, a polynucleotide primer or probe under stringent conditions will hybridize to its target nucleotide sequence to a detectably greater degree than to other nucleotide sequences by at least 2-fold. In some embodiments, a polynucleotide primer or probe under stringent conditions will hybridize to its target nucleotide sequence to a detectably greater degree than to other nucleotide sequences by at least 3-fold. In some embodiments, a polynucleotide primer or probe under stringent conditions will hybridize to its target nucleotide sequence to a detectably greater degree than to other nucleotide sequences by at least 4-fold. In some embodiments, a polynucleotide primer or probe under stringent conditions will hybridize to its target nucleotide sequence to a detectably greater degree than to other nucleotide sequences by over 10-fold over background. Stringent conditions are sequence-dependent and will be different in different circumstances.

[0116] Appropriate stringency conditions which promote DNA hybridization, for example, 6× sodium chloride/sodium citrate (SSC) at about 45° C., followed by a wash of 2×SSC at 50° C., are known or can be found in Current Protocols in Molecular Biology, John Wiley & Sons, N.Y. (1989), 6.3.1-6.3.6. Typically, stringent conditions for hybridization and detection will be those in which the salt concentration is less than about 1.5 M Na⁺ ion, typically about 0.01 to 1.0 M Na⁺ ion concentration (or other salts) at pH 7.0 to 8.3 and the temperature is at least about 30° C. for short probes (such as, for example, 10 to 50 nucleotides) and at least about 60° C. for longer probes (such as, for example, greater than 50 nucleotides). Stringent conditions may also be achieved with the addition of destabilizing agents such as formamide. Optionally, wash buffers may comprise about 0.1% to about 1% SDS. Duration of hybridization is generally less than about 24 hours, usually about 4 to about 12 hours. The duration of the wash time will be at least a length of time sufficient to reach equilibrium.

[0117] The present disclosure also provides methods of detecting the presence of an ST6GALNAC5 predicted loss-of-function polypeptide comprising performing an assay on a biological sample obtained from the subject to determine whether an ST6GALNAC5 polypeptide in the biological sample contains one or more variations that causes the polypeptide to have a loss-of-function (partial or complete) or predicted loss-of-function (partial or complete). The ST6GALNAC5 predicted loss-of-function polypeptide can be any of the ST6GALNAC5 predicted loss-of-function polypeptides described herein. In some embodiments, the methods detect the presence of ST6GALNAC5 Val135Ala, Val45Ala, Val45A1a*, or Val135A1a*. In some embodiments, the methods detect the presence of ST6GALNAC5 Val135Ala. In some embodiments, the methods detect the presence of ST6GALNAC5 Val45Ala. In some embodiments, the methods detect the presence of ST6GALNAC5 Val45A1a*. In some embodiments, the methods detect the presence of ST6GALNAC5 Val135A1a*.

[0118] In some embodiments, the methods comprise performing an assay on a biological sample obtained from a subject to determine whether an ST6GALNAC5 polypeptide in the biological sample comprises an alanine at a position corresponding to position 135 according to SEQ ID NO:39, an alanine at a position corresponding to position 45 according to SEQ ID NO:40, an alanine at a position corresponding to position 45 according to SEQ ID NO:41, or an alanine at a position corresponding to position 135 according to SEQ ID NO:42.

[0119] In some embodiments, the detecting step comprises sequencing at least a portion of the ST6GALNAC5 polypeptide that comprises a position corresponding to: position 135 according to SEQ ID NO:39, position 45 according to SEQ ID NO:40, position 45 according to SEQ ID NO:41, or position 135 according to SEQ ID NO:42, or SEQ ID NO:35, SEQ ID NO:36, SEQ ID NO:37, or SEQ ID NO:38.

[0120] In some embodiments, the detecting step comprises an immunoassay for detecting the presence of a ST6GALNAC5 polypeptide that comprises a position corresponding to: position 135 according to SEQ ID NO:39, position 45 according to SEQ ID NO:40, position 45 according to SEQ ID NO:41, or position 135 according to SEQ ID NO:42, or SEQ ID NO:35, SEQ ID NO:36, SEQ ID NO:37, or SEQ ID NO:38.

[0121] In some embodiments, when the subject does not have an ST6GALNAC5 predicted loss-of-function polypeptide, the subject has an increased risk of developing cognitive impairment or any of decreased myelin integrity, neurodegeneration, decreased GWC, and conversion of mild cognitive impairment to dementia. In some embodiments, when the subject has an ST6GALNAC5 predicted loss-of-function polypeptide, the subject has a decreased risk of developing cognitive impairment or any of decreased myelin integrity, neurodegeneration, decreased GWC, and conversion of mild cognitive impairment to dementia.

[0122] The present disclosure also provides isolated nucleic acid molecules that hybridize to ST6GALNAC5 missense variant genomic nucleic acid molecules, ST6GALNAC5 missense variant mRNA molecules, and/or ST6GALNAC5 missense variant cDNA molecules (such as any of the genomic variant nucleic acid molecules, mRNA variant molecules, and cDNA variant molecules disclosed herein). In some embodiments, such isolated nucleic acid molecules hybridize to ST6GALNAC5 missense variant nucleic acid molecules under stringent conditions. Such nucleic acid molecules can be used, for example, as probes, primers, alteration-specific probes, or alteration-specific primers as described or exemplified herein.

[0123] In some embodiments, the isolated nucleic acid molecules hybridize to a portion of the ST6GALNAC5 missense nucleic acid molecule that includes a position corresponding to: position 176,867 according to SEQ ID NO:2, position 600 according to SEQ ID NO:11, position 639 according to SEQ ID NO:12, position 562 according to SEQ ID NO:13, position 515 according to SEQ ID NO:14, position 579 according to SEQ ID NO:15, position 416 according to SEQ ID NO:16, position 639 according to SEQ ID NO:17, position 600 according to SEQ ID NO:18, position 600 according to SEQ ID NO:27, position 639 according to SEQ ID NO:28, position 562 according to SEQ ID NO:29, position 515 according to SEQ ID NO:30, position 579 according to SEQ ID NO:31, position 416 according to SEQ ID NO:32, position 639 according to SEQ ID NO:33, or position 600 according to SEQ ID NO:34.

[0124] In some embodiments, such isolated nucleic acid molecules comprise or consist of at least about 5, at least about 8, at least about 10, at least about 11, at least about 12, at least about 13, at least about 14, at least about 15, at least about 16, at least about 17, at least about 18, at least about 19, at least about 20, at least about 21, at least about 22, at least about 23, at least about 24, at least about 25, at least about 30, at least about 35, at least about 40, at least about 45, at least about 50, at least about 55, at least about 60, at least about 65, at least about 70, at least about 75, at least about 80, at least about 85, at least about 90, at least about 95, at least about 100, at least about 200, at least about 300, at least about 400, at least about 500, at least about 600, at least about 700, at least about 800, at least about 900, at least about 1000, at least about 2000, at least about 3000, at least about 4000, or at least about 5000 nucleotides. In some embodiments, such isolated nucleic acid molecules comprise or consist of at least about 5, at least about 8, at least about 10, at least about 11, at least about 12, at least about 13, at least about 14, at least about 15, at least about 16, at least about 17, at least about 18, at least about 19, at least about 20, at least about 21, at least about 22, at least about 23, at least about 24, or at least about 25 nucleotides. In some embodiments, the isolated nucleic acid molecules comprise or consist of at least about 18 nucleotides. In some embodiments, the isolated nucleic acid molecules comprise or consists of at least about 15 nucleotides. In some embodiments, the isolated nucleic acid molecules consist of or comprise from about 10 to about 35, from about 10 to about 30, from about 10 to about 25, from about 12 to about 30, from about 12 to about 28, from about 12 to about 24, from about 15 to about 30, from about 15 to about 25, from about 18 to about 30, from about 18 to about 25, from about 18 to about 24, or from about 18 to about 22 nucleotides. In some embodiments, the isolated nucleic acid molecules consist of or comprise from about 18 to about 30 nucleotides. In some embodiments, the isolated nucleic acid molecules comprise or consist of at least about 15 nucleotides to at least about 35 nucleotides.

[0125] In some embodiments, the isolated nucleic acid molecules hybridize to at least about 15 contiguous nucleotides of a nucleic acid molecule that is at least about 70%, at least about 75%, at least about 80%, at least about 85%, at least about 90%, at least about 95%, at least about 96%, at least about 97%, at least about 98%, at least about 99%, or 100% identical to ST6GALNAC5 missense variant genomic nucleic acid molecules, ST6GALNAC5 missense variant mRNA molecules, and/or ST6GALNAC5 missense variant cDNA molecules. In some embodiments, the isolated nucleic acid molecules consist of or comprise from about 15 to about 100 nucleotides, or from about 15 to about 35 nucleotides. In some embodiments, the isolated nucleic acid molecules consist of or comprise from about 15 to about 100 nucleotides. In some embodiments, the isolated nucleic acid molecules consist of or comprise from about 15 to about 35 nucleotides.

[0126] In some embodiments, the isolated alteration-specific probes or alteration-specific primers comprise at least about 15 nucleotides, wherein the alteration-specific probe or alteration-specific primer comprises a nucleotide sequence which is complementary to the nucleotide sequence of a portion of an ST6GALNAC5 missense nucleic acid molecule encoding a ST6GALNAC5 predicted loss-of-function polypeptide, or the complement thereof. In some embodiments, the portion comprises a position corresponding to: position 176,867 according to SEQ ID NO:2, or the complement thereof; position 600 according to SEQ ID NO:11, or the complement thereof; position 639 according to SEQ ID NO:12, or the complement thereof; position 562 according to SEQ ID NO:13, or the complement thereof; position 515 according to SEQ ID NO:14, or the complement thereof; position 579 according to SEQ ID NO:15, or the complement thereof; position 416 according to SEQ ID NO:16, or the complement thereof; position 639 according to SEQ ID NO:17, or the complement thereof; position 600 according to SEQ ID NO:18, or the complement thereof; position 600 according to SEQ ID NO:27, or the complement thereof; position 639 according to SEQ ID NO:28, or the complement thereof; position 562 according to SEQ ID NO:29, or the complement thereof; position 515 according to SEQ ID NO:30, or the complement thereof; position 579 according to SEQ ID NO:31, or the complement thereof; position 416 according to SEQ ID NO:32, or the complement thereof; position 639 according to SEQ ID NO:33, or the complement thereof; or position 600 according to SEQ ID NO:34, or the complement thereof. In some embodiments, the portion comprises positions corresponding to: positions 176,866-176,868 according to SEQ ID NO:2, or the complement thereof; positions 599-601 according to SEQ ID NO:11, or the complement thereof; positions 638-640 according to SEQ ID NO:12, or the complement thereof; positions 561-563 according to SEQ ID NO:13, or the complement thereof; positions 514-516 according to SEQ ID NO:14, or the complement thereof; positions 578-580 according to SEQ ID NO:15, or the complement thereof; positions 415-417 according to SEQ ID NO:16, or the complement thereof; positions 638-640 according to SEQ ID NO:17, or the complement thereof; positions 599-601 according to SEQ ID NO:18, or the complement thereof; positions 599-601 according to SEQ ID NO:27, or the complement thereof; positions 638-640 according to SEQ ID NO:28, or the complement thereof; positions 561-563 according to SEQ ID NO:29, or the complement thereof; positions 514-516 according to SEQ ID NO:30, or the complement thereof; positions 578-580 according to SEQ ID NO:31, or the complement thereof; positions 415-417 according to SEQ ID NO:32, or the complement thereof; positions 638-640 according to SEQ ID NO:33, or the complement thereof; or positions 599-601 according to SEQ ID NO:34, or the complement thereof.

[0127] In some embodiments, the alteration-specific probes and alteration-specific primers comprise DNA. In some embodiments, the alteration-specific probes and alteration-specific primers comprise RNA.

[0128] In some embodiments, the probes and primers described herein (including alteration-specific probes and alteration-specific primers) have a nucleotide sequence that specifically hybridizes to any of the nucleic acid molecules disclosed herein, or the complement thereof. In some embodiments, the probes and primers specifically hybridize to any of the nucleic acid molecules disclosed herein under stringent conditions.

[0129] In some embodiments, the primers, including alteration-specific primers, can be used in second generation sequencing or high throughput sequencing. In some instances, the primers, including alteration-specific primers, can be modified. In particular, the primers can comprise various modifications that are used at different steps of, for example, Massive Parallel Signature Sequencing (MPSS), Polony sequencing, and 454 Pyrosequencing. Modified primers can be used at several steps of the process, including biotinylated primers in the cloning step and fluorescently labeled primers used at the bead loading step and detection step. Polony sequencing is generally performed using a paired-end tags library wherein each molecule of DNA template is about 135 bp in length. Biotinylated primers are used at the bead loading step and emulsion PCR. Fluorescently labeled degenerate nonamer oligonucleotides are used at the detection step. An adaptor can contain a 5′-biotin tag for immobilization of the DNA library onto streptavidin-coated beads.

[0130] The probes and primers described herein can be used to detect a nucleotide variation within any of the ST6GALNAC5 missense variant genomic nucleic acid molecules, ST6GALNAC5 missense variant mRNA molecules, and/or ST6GALNAC5 missense variant cDNA molecules disclosed herein. The primers described herein can be used to amplify the ST6GALNAC5 missense variant genomic nucleic acid molecules, ST6GALNAC5 missense variant mRNA molecules, or ST6GALNAC5 missense variant cDNA molecules, or a fragment thereof.

[0131] The present disclosure also provides pairs of primers comprising any of the primers described above. For example, if one of the primers' 3′-ends hybridizes to a thymine at a position corresponding to position 176,867 according to SEQ ID NO:1 (rather than a cytosine) in a particular ST6GALNAC5 nucleic acid molecule, then the presence of the amplified fragment would indicate the presence of an ST6GALNAC5 reference genomic nucleic acid molecule. Conversely, if one of the primers' 3′-ends hybridizes to a cytosine at a position corresponding to position 176,867 according to SEQ ID NO:2 (rather than a thymine) in a particular ST6GALNAC5 nucleic acid molecule, then the presence of the amplified fragment would indicate the presence of the ST6GALNAC5 missense variant genomic nucleic acid molecule. In some embodiments, the nucleotide of the primer complementary to the cytosine at a position corresponding to position 176,867 according to SEQ ID NO:2 can be at the 3′ end of the primer.

[0132] If one of the primers' 3′-ends hybridizes to a uracil at a position corresponding to position 600 according to SEQ ID NO:3 (rather than a cytosine) in a particular ST6GALNAC5 nucleic acid molecule, then the presence of the amplified fragment would indicate the presence of an ST6GALNAC5 reference mRNA molecule. Conversely, if one of the primers' 3′-ends hybridizes to a cytosine at a position corresponding to position 600 according to SEQ ID NO:11 (rather than a uracil) in a particular ST6GALNAC5 mRNA molecule, then the presence of the amplified fragment would indicate the presence of the ST6GALNAC5 missense variant mRNA molecule. In some embodiments, the nucleotide of the primer complementary to the cytosine at a position corresponding to position 600 according to SEQ ID NO:11 can be at the 3′ end of the primer.

[0133] If one of the primers' 3′-ends hybridizes to a uracil at a position corresponding to position 639 according to SEQ ID NO:4 (rather than a cytosine) in a particular ST6GALNAC5 nucleic acid molecule, then the presence of the amplified fragment would indicate the presence of an ST6GALNAC5 reference mRNA molecule. Conversely, if one of the primers' 3′-ends hybridizes to a cytosine at a position corresponding to position 639 according to SEQ ID NO:12 (rather than a uracil) in a particular ST6GALNAC5 mRNA molecule, then the presence of the amplified fragment would indicate the presence of the ST6GALNAC5 missense variant mRNA molecule. In some embodiments, the nucleotide of the primer complementary to the cytosine at a position corresponding to position 639 according to SEQ ID NO:12 can be at the 3′ end of the primer.

[0134] If one of the primers' 3′-ends hybridizes to a uracil at a position corresponding to position 562 according to SEQ ID NO:5 (rather than a cytosine) in a particular ST6GALNAC5 nucleic acid molecule, then the presence of the amplified fragment would indicate the presence of an ST6GALNAC5 reference mRNA molecule. Conversely, if one of the primers' 3′-ends hybridizes to a cytosine at a position corresponding to position 562 according to SEQ ID NO:13 (rather than a uracil) in a particular ST6GALNAC5 mRNA molecule, then the presence of the amplified fragment would indicate the presence of the ST6GALNAC5 missense variant mRNA molecule. In some embodiments, the nucleotide of the primer complementary to the cytosine at a position corresponding to position 562 according to SEQ ID NO:13 can be at the 3′ end of the primer.

[0135] If one of the primers' 3′-ends hybridizes to a uracil at a position corresponding to position 515 according to SEQ ID NO:6 (rather than a cytosine) in a particular ST6GALNAC5 nucleic acid molecule, then the presence of the amplified fragment would indicate the presence of an ST6GALNAC5 reference mRNA molecule. Conversely, if one of the primers' 3′-ends hybridizes to a cytosine at a position corresponding to position 515 according to SEQ ID NO:14 (rather than a uracil) in a particular ST6GALNAC5 mRNA molecule, then the presence of the amplified fragment would indicate the presence of the ST6GALNAC5 missense variant mRNA molecule. In some embodiments, the nucleotide of the primer complementary to the cytosine at a position corresponding to position 515 according to SEQ ID NO:14 can be at the 3′ end of the primer.

[0136] If one of the primers' 3′-ends hybridizes to a uracil at a position corresponding to position 579 according to SEQ ID NO:7 (rather than a cytosine) in a particular ST6GALNAC5 nucleic acid molecule, then the presence of the amplified fragment would indicate the presence of an ST6GALNAC5 reference mRNA molecule. Conversely, if one of the primers' 3′-ends hybridizes to a cytosine at a position corresponding to position 579 according to SEQ ID NO:15 (rather than a uracil) in a particular ST6GALNAC5 mRNA molecule, then the presence of the amplified fragment would indicate the presence of the ST6GALNAC5 missense variant mRNA molecule. In some embodiments, the nucleotide of the primer complementary to the cytosine at a position corresponding to position 579 according to SEQ ID NO:15 can be at the 3′ end of the primer.

[0137] If one of the primers' 3′-ends hybridizes to a uracil at a position corresponding to position 416 according to SEQ ID NO:8 (rather than a cytosine) in a particular ST6GALNAC5 nucleic acid molecule, then the presence of the amplified fragment would indicate the presence of an ST6GALNAC5 reference mRNA molecule. Conversely, if one of the primers' 3′-ends hybridizes to a cytosine at a position corresponding to position 416 according to SEQ ID NO:16 (rather than a uracil) in a particular ST6GALNAC5 mRNA molecule, then the presence of the amplified fragment would indicate the presence of the ST6GALNAC5 missense variant mRNA molecule. In some embodiments, the nucleotide of the primer complementary to the cytosine at a position corresponding to position 416 according to SEQ ID NO:16 can be at the 3′ end of the primer.

[0138] If one of the primers' 3′-ends hybridizes to a uracil at a position corresponding to position 639 according to SEQ ID NO:9 (rather than a cytosine) in a particular ST6GALNAC5 nucleic acid molecule, then the presence of the amplified fragment would indicate the presence of an ST6GALNAC5 reference mRNA molecule. Conversely, if one of the primers' 3′-ends hybridizes to a cytosine at a position corresponding to position 639 according to SEQ ID NO:17 (rather than a uracil) in a particular ST6GALNAC5 mRNA molecule, then the presence of the amplified fragment would indicate the presence of the ST6GALNAC5 missense variant mRNA molecule. In some embodiments, the nucleotide of the primer complementary to the cytosine at a position corresponding to position 639 according to SEQ ID NO:17 can be at the 3′ end of the primer.

[0139] If one of the primers' 3′-ends hybridizes to a uracil at a position corresponding to position 600 according to SEQ ID NO:10 (rather than a cytosine) in a particular ST6GALNAC5 nucleic acid molecule, then the presence of the amplified fragment would indicate the presence of an ST6GALNAC5 reference mRNA molecule. Conversely, if one of the primers' 3′-ends hybridizes to a cytosine at a position corresponding to position 600 according to SEQ ID NO:18 (rather than a uracil) in a particular ST6GALNAC5 mRNA molecule, then the presence of the amplified fragment would indicate the presence of the ST6GALNAC5 missense variant mRNA molecule. In some embodiments, the nucleotide of the primer complementary to the cytosine at a position corresponding to position 600 according to SEQ ID NO:18 can be at the 3′ end of the primer.

[0140] If one of the primers' 3′-ends hybridizes to a thymine at a position corresponding to position 600 according to SEQ ID NO:19 (rather than a cytosine) in a particular ST6GALNAC5 nucleic acid molecule, then the presence of the amplified fragment would indicate the presence of an ST6GALNAC5 reference cDNA molecule. Conversely, if one of the primers' 3′-ends hybridizes to a cytosine at a position corresponding to position 600 according to SEQ ID NO:27 (rather than a thymine) in a particular ST6GALNAC5 cDNA molecule, then the presence of the amplified fragment would indicate the presence of the ST6GALNAC5 missense variant cDNA molecule. In some embodiments, the nucleotide of the primer complementary to the cytosine at a position corresponding to position 600 according to SEQ ID NO:27 can be at the 3′ end of the primer.

[0141] If one of the primers' 3′-ends hybridizes to a thymine at a position corresponding to position 639 according to SEQ ID NO:20 (rather than a cytosine) in a particular ST6GALNAC5 nucleic acid molecule, then the presence of the amplified fragment would indicate the presence of an ST6GALNAC5 reference cDNA molecule. Conversely, if one of the primers' 3′-ends hybridizes to a cytosine at a position corresponding to position 639 according to SEQ ID NO:28 (rather than a thymine) in a particular ST6GALNAC5 cDNA molecule, then the presence of the amplified fragment would indicate the presence of the ST6GALNAC5 missense variant cDNA molecule. In some embodiments, the nucleotide of the primer complementary to the cytosine at a position corresponding to position 639 according to SEQ ID NO:28 can be at the 3′ end of the primer.

[0142] If one of the primers' 3′-ends hybridizes to a thymine at a position corresponding to position 562 according to SEQ ID NO:21 (rather than a cytosine) in a particular ST6GALNAC5 nucleic acid molecule, then the presence of the amplified fragment would indicate the presence of an ST6GALNAC5 reference cDNA molecule. Conversely, if one of the primers' 3′-ends hybridizes to a cytosine at a position corresponding to position 562 according to SEQ ID NO:29 (rather than a thymine) in a particular ST6GALNAC5 cDNA molecule, then the presence of the amplified fragment would indicate the presence of the ST6GALNAC5 missense variant cDNA molecule. In some embodiments, the nucleotide of the primer complementary to the cytosine at a position corresponding to position 562 according to SEQ ID NO:29 can be at the 3′ end of the primer.

[0143] If one of the primers' 3′-ends hybridizes to a thymine at a position corresponding to position 515 according to SEQ ID NO:22 (rather than a cytosine) in a particular ST6GALNAC5 nucleic acid molecule, then the presence of the amplified fragment would indicate the presence of an ST6GALNAC5 reference cDNA molecule. Conversely, if one of the primers' 3′-ends hybridizes to a cytosine at a position corresponding to position 515 according to SEQ ID NO:30 (rather than a thymine) in a particular ST6GALNAC5 cDNA molecule, then the presence of the amplified fragment would indicate the presence of the ST6GALNAC5 missense variant cDNA molecule. In some embodiments, the nucleotide of the primer complementary to the cytosine at a position corresponding to position 515 according to SEQ ID NO:30 can be at the 3′ end of the primer.

[0144] If one of the primers' 3′-ends hybridizes to a thymine at a position corresponding to position 579 according to SEQ ID NO:23 (rather than a cytosine) in a particular ST6GALNAC5 nucleic acid molecule, then the presence of the amplified fragment would indicate the presence of an ST6GALNAC5 reference cDNA molecule. Conversely, if one of the primers' 3′-ends hybridizes to a cytosine at a position corresponding to position 579 according to SEQ ID NO:31 (rather than a thymine) in a particular ST6GALNAC5 cDNA molecule, then the presence of the amplified fragment would indicate the presence of the ST6GALNAC5 missense variant cDNA molecule. In some embodiments, the nucleotide of the primer complementary to the cytosine at a position corresponding to position 579 according to SEQ ID NO:31 can be at the 3′ end of the primer.

[0145] If one of the primers' 3′-ends hybridizes to a thymine at a position corresponding to position 416 according to SEQ ID NO:24 (rather than a cytosine) in a particular ST6GALNAC5 nucleic acid molecule, then the presence of the amplified fragment would indicate the presence of an ST6GALNAC5 reference cDNA molecule. Conversely, if one of the primers' 3′-ends hybridizes to a cytosine at a position corresponding to position 416 according to SEQ ID NO:32 (rather than a thymine) in a particular ST6GALNAC5 cDNA molecule, then the presence of the amplified fragment would indicate the presence of the ST6GALNAC5 missense variant cDNA molecule. In some embodiments, the nucleotide of the primer complementary to the cytosine at a position corresponding to position 416 according to SEQ ID NO:32 can be at the 3′ end of the primer.

[0146] If one of the primers' 3′-ends hybridizes to a thymine at a position corresponding to position 639 according to SEQ ID NO:25 (rather than a cytosine) in a particular ST6GALNAC5 nucleic acid molecule, then the presence of the amplified fragment would indicate the presence of an ST6GALNAC5 reference cDNA molecule. Conversely, if one of the primers' 3′-ends hybridizes to a cytosine at a position corresponding to position 639 according to SEQ ID NO:33 (rather than a thymine) in a particular ST6GALNAC5 cDNA molecule, then the presence of the amplified fragment would indicate the presence of the ST6GALNAC5 missense variant cDNA molecule. In some embodiments, the nucleotide of the primer complementary to the cytosine at a position corresponding to position 639 according to SEQ ID NO:33 can be at the 3′ end of the primer.

[0147] If one of the primers' 3′-ends hybridizes to a thymine at a position corresponding to position 600 according to SEQ ID NO:26 (rather than a cytosine) in a particular ST6GALNAC5 nucleic acid molecule, then the presence of the amplified fragment would indicate the presence of an ST6GALNAC5 reference cDNA molecule. Conversely, if one of the primers' 3′-ends hybridizes to a cytosine at a position corresponding to position 600 according to SEQ ID NO:34 (rather than a thymine) in a particular ST6GALNAC5 cDNA molecule, then the presence of the amplified fragment would indicate the presence of the ST6GALNAC5 missense variant cDNA molecule. In some embodiments, the nucleotide of the primer complementary to the cytosine at a position corresponding to position 600 according to SEQ ID NO:34 can be at the 3′ end of the primer.

[0148] In the context of the present disclosure “specifically hybridizes” means that the probe or primer (such as, for example, the alteration-specific probe or alteration-specific primer) does not hybridize to a nucleic acid sequence encoding an ST6GALNAC5 reference genomic nucleic acid molecule, an ST6GALNAC5 reference mRNA molecule, and/or an ST6GALNAC5 reference cDNA molecule.

[0149] In any of the embodiments described throughout the present disclosure, the probes (such as, for example, an alteration-specific probe) can comprise a label. In some embodiments, the label is a fluorescent label, a radiolabel, or biotin.

[0150] The present disclosure also provides supports comprising a substrate to which any one or more of the probes disclosed herein is attached. Solid supports are solid-state substrates or supports with which molecules, such as any of the probes disclosed herein, can be associated. A form of solid support is an array. Another form of solid support is an array detector. An array detector is a solid support to which multiple different probes have been coupled in an array, grid, or other organized pattern. A form for a solid-state substrate is a microtiter dish, such as a standard 96-well type. In some embodiments, a multiwell glass slide can be employed that normally contains one array per well. In some embodiments, the support is a microarray.

[0151] The present disclosure also provides molecular complexes comprising or consisting of any of the ST6GALNAC5 missense nucleic acid molecules (genomic nucleic acid molecules, mRNA molecules, or cDNA molecules), or complement thereof, described herein and any of the alteration-specific primers or alteration-specific probes described herein. In some embodiments, the ST6GALNAC5 missense nucleic acid molecules (genomic nucleic acid molecules, mRNA molecules, or cDNA molecules), or complement thereof, in the molecular complexes are single-stranded. In some embodiments, the ST6GALNAC5 missense nucleic acid molecule is any of the genomic nucleic acid molecules described herein. In some embodiments, the ST6GALNAC5 missense nucleic acid molecule is any of the mRNA molecules described herein. In some embodiments, the ST6GALNAC5 missense nucleic acid molecule is any of the cDNA molecules described herein. In some embodiments, the molecular complex comprises or consists of any of the ST6GALNAC5 missense nucleic acid molecules (genomic nucleic acid molecules, mRNA molecules, or cDNA molecules), or complement thereof, described herein and any of the alteration-specific primers described herein. In some embodiments, the molecular complex comprises or consists of any of the ST6GALNAC5 missense nucleic acid molecules (genomic nucleic acid molecules, mRNA molecules, or cDNA molecules), or complement thereof, described herein and any of the alteration-specific probes described herein.

[0152] In some embodiments, the molecular complex comprises or consists of an alteration-specific primer or an alteration-specific probe hybridized to an ST6GALNAC5 genomic nucleic acid molecule encoding an ST6GALNAC5 predicted loss-of-function polypeptide, wherein the alteration-specific primer or the alteration-specific probe is hybridized to the ST6GALNAC5 genomic nucleic acid molecule at a position corresponding to: position 176,867 according to SEQ ID NO:2, or the complement thereof.

[0153] In some embodiments, the molecular complex comprises or consists of an alteration-specific primer or an alteration-specific probe that is hybridized to a GCG codon at positions corresponding to positions 176,866-176,868 according to SEQ ID NO:2.

[0154] In some embodiments, the molecular complex comprises or consists of a genomic nucleic acid molecule that comprises SEQ ID NO:2.

[0155] In some embodiments, the molecular complex comprises or consists of an alteration-specific primer or an alteration-specific probe hybridized to an ST6GALNAC5 mRNA molecule encoding an ST6GALNAC5 predicted loss-of-function polypeptide, wherein the alteration-specific primer or the alteration-specific probe is hybridized to the ST6GALNAC5 mRNA molecule at a position corresponding to: position 600 according to SEQ ID NO:11, or the complement thereof; position 639 according to SEQ ID NO:12, or the complement thereof; position 562 according to SEQ ID NO:13, or the complement thereof; position 515 according to SEQ ID NO:14, or the complement thereof; position 579 according to SEQ ID NO:15, or the complement thereof; position 416 according to SEQ ID NO:16, or the complement thereof; position 639 according to SEQ ID NO:17, or the complement thereof; or position 600 according to SEQ ID NO:18, or the complement thereof.

[0156] In some embodiments, the molecular complex comprises or consists of an alteration-specific primer or an alteration-specific probe that is hybridized to: a GCG codon at positions corresponding to positions 599-601 according to SEQ ID NO:11, a GCG codon at positions corresponding to positions 638-640 according to SEQ ID NO:12, a GCG codon at positions corresponding to positions 561-563 according to SEQ ID NO:13, a GCG codon at positions corresponding to positions 514-516 according to SEQ ID NO:14, a GCG codon at positions corresponding to positions 578-580 according to SEQ ID NO:15, a GCG codon at positions corresponding to positions 415-417 according to SEQ ID NO:16, a GCG codon at positions corresponding to positions 638-640 according to SEQ ID NO:17, or a GCG codon at positions corresponding to positions 599-601 according to SEQ ID NO:18.

[0157] In some embodiments, the molecular complex comprises or consists of an mRNA molecule that comprises SEQ ID NO:11, SEQ ID NO:12, SEQ ID NO:13, SEQ ID NO:14, SEQ ID NO:15, SEQ ID NO:16, SEQ ID NO:17, or SEQ ID NO:18.

[0158] In some embodiments, the molecular complex comprises or consists of an alteration-specific primer or an alteration-specific probe hybridized to an ST6GALNAC5 cDNA molecule encoding an ST6GALNAC5 predicted loss-of-function polypeptide, wherein the alteration-specific primer or the alteration-specific probe is hybridized to the ST6GALNAC5 cDNA molecule at a position corresponding to: position 600 according to SEQ ID NO:27, or the complement thereof; position 639 according to SEQ ID NO:28, or the complement thereof; position 562 according to SEQ ID NO:29, or the complement thereof; position 515 according to SEQ ID NO:30, or the complement thereof; position 579 according to SEQ ID NO:31, or the complement thereof; position 416 according to SEQ ID NO:32, or the complement thereof; position 639 according to SEQ ID NO:33, or the complement thereof; or position 600 according to SEQ ID NO:34, or the complement thereof.

[0159] In some embodiments, the molecular complex comprises or consists of an alteration-specific primer or an alteration-specific probe that is hybridized to: a GCG codon at positions corresponding to positions 599-601 according to SEQ ID NO:27, a GCG codon at positions corresponding to positions 638-640 according to SEQ ID NO:28, a GCG codon at positions corresponding to positions 561-563 according to SEQ ID NO:29, a GCG codon at positions corresponding to positions 514-516 according to SEQ ID NO:30, a GCG codon at positions corresponding to positions 578-580 according to SEQ ID NO:31, a GCG codon at positions corresponding to positions 415-417 according to SEQ ID NO:32, a GCG codon at positions corresponding to positions 638-640 according to SEQ ID NO:33, or a GCG codon at positions corresponding to positions 599-601 according to SEQ ID NO:34.

[0160] In some embodiments, the molecular complex comprises or consists of an cDNA molecule that comprises SEQ ID NO:27, SEQ ID NO:28, SEQ ID NO:29, SEQ ID NO:30, SEQ ID NO:31, SEQ ID NO:32, SEQ ID NO:33, or SEQ ID NO:34.

[0161] In some embodiments, the molecular complex comprises an alteration-specific probe or an alteration-specific primer comprising a label. In some embodiments, the label is a fluorescent label, a radiolabel, or biotin. In some embodiments, the molecular complex further comprises a non-human polymerase.

[0162] The nucleotide sequence of an ST6GALNAC5 reference genomic nucleic acid molecule is set forth in SEQ ID NO:1. Referring to SEQ ID NO:1, position 176,867 is a thymine.

[0163] A ST6GALNAC5 missense variant genomic nucleic acid molecule exists, wherein the thymine at position 176,867 is replaced with a cytosine (r5756654226; chr1:77044346 in the GRCh38/hg38 human genome assembly). The nucleotide sequence of this ST6GALNAC5 missense variant genomic nucleic acid molecule is set forth in SEQ ID NO:2.

[0164] The nucleotide sequence of an ST6GALNAC5 reference mRNA molecule is set forth in SEQ ID NO:3. Referring to SEQ ID NO:3, position 600 is a uracil. The nucleotide sequence of another ST6GALNAC5 reference mRNA molecule is set forth in SEQ ID NO:4. Referring to SEQ ID NO:4, position 639 is a uracil. The nucleotide sequence of another ST6GALNAC5 reference mRNA molecule is set forth in SEQ ID NO:5. Referring to SEQ ID NO:5, position 562 is a uracil. The nucleotide sequence of another ST6GALNAC5 reference mRNA molecule is set forth in SEQ ID NO:6. Referring to SEQ ID NO:6, position 515 is a uracil. The nucleotide sequence of another ST6GALNAC5 reference mRNA molecule is set forth in SEQ ID NO:7. Referring to SEQ ID NO:7, position 579 is a uracil. The nucleotide sequence of another ST6GALNAC5 reference mRNA molecule is set forth in SEQ ID NO:8. Referring to SEQ ID NO:8, position 416 is a uracil. The nucleotide sequence of another ST6GALNAC5 reference mRNA molecule is set forth in SEQ ID NO:9. Referring to SEQ ID NO:9, position 639 is a uracil. The nucleotide sequence of another ST6GALNAC5 reference mRNA molecule is set forth in SEQ ID NO:10. Referring to SEQ ID NO:10, position 600 is a uracil.

[0165] A ST6GALNAC5 missense variant mRNA molecule exists, wherein the uracil at position 600 is replaced with a cytosine. The nucleotide sequence of this ST6GALNAC5 missense variant mRNA molecule is set forth in SEQ ID NO:11.

[0166] Another ST6GALNAC5 missense variant mRNA molecule exists, wherein the uracil at position 639 is replaced with a cytosine. The nucleotide sequence of this ST6GALNAC5 missense variant mRNA molecule is set forth in SEQ ID NO:12.

[0167] Another ST6GALNAC5 missense variant mRNA molecule exists, wherein the uracil at position 562 is replaced with a cytosine. The nucleotide sequence of this ST6GALNAC5 missense variant mRNA molecule is set forth in SEQ ID NO:13.

[0168] Another ST6GALNAC5 missense variant mRNA molecule exists, wherein the uracil at position 515 is replaced with a cytosine. The nucleotide sequence of this ST6GALNAC5 missense variant mRNA molecule is set forth in SEQ ID NO:14.

[0169] Another ST6GALNAC5 missense variant mRNA molecule exists, wherein the uracil at position 579 is replaced with a cytosine. The nucleotide sequence of this ST6GALNAC5 missense variant mRNA molecule is set forth in SEQ ID NO:15.

[0170] Another ST6GALNAC5 missense variant mRNA molecule exists, wherein the uracil at position 416 is replaced with a cytosine. The nucleotide sequence of this ST6GALNAC5 missense variant mRNA molecule is set forth in SEQ ID NO:16.

[0171] Another ST6GALNAC5 missense variant mRNA molecule exists, wherein the uracil at position 639 is replaced with a cytosine. The nucleotide sequence of this ST6GALNAC5 missense variant mRNA molecule is set forth in SEQ ID NO:17.

[0172] Another ST6GALNAC5 missense variant mRNA molecule exists, wherein the uracil at position 600 is replaced with a cytosine. The nucleotide sequence of this ST6GALNAC5 missense variant mRNA molecule is set forth in SEQ ID NO:18.

[0173] The nucleotide sequence of an ST6GALNAC5 reference cDNA molecule is set forth in SEQ ID NO:19. Referring to SEQ ID NO:19, position 600 is a thymine. The nucleotide sequence of another ST6GALNAC5 reference cDNA molecule is set forth in SEQ ID NO:20. Referring to SEQ ID NO:20, position 639 is a thymine. The nucleotide sequence of another ST6GALNAC5 reference cDNA molecule is set forth in SEQ ID NO:21. Referring to SEQ ID NO:21, position 562 is a thymine. The nucleotide sequence of another ST6GALNAC5 reference cDNA molecule is set forth in SEQ ID NO:22. Referring to SEQ ID NO:22, position 515 is a thymine. The nucleotide sequence of another ST6GALNAC5 reference cDNA molecule is set forth in SEQ ID NO:23. Referring to SEQ ID NO:23, position 579 is a thymine. The nucleotide sequence of another ST6GALNAC5 reference cDNA molecule is set forth in SEQ ID NO:24. Referring to SEQ ID NO:24, position 416 is a thymine. The nucleotide sequence of another ST6GALNAC5 reference cDNA molecule is set forth in SEQ ID NO:25. Referring to SEQ ID NO:25, position 639 is a thymine. The nucleotide sequence of another ST6GALNAC5 reference cDNA molecule is set forth in SEQ ID NO:26. Referring to SEQ ID NO:26, position 600 is a thymine.

[0174] A ST6GALNAC5 missense variant cDNA molecule exists, wherein the thymine at position 600 is replaced with a cytosine. The nucleotide sequence of this ST6GALNAC5 missense variant cDNA molecule is set forth in SEQ ID NO:27.

[0175] Another ST6GALNAC5 missense variant cDNA molecule exists, wherein the thymine at position 639 is replaced with a cytosine. The nucleotide sequence of this ST6GALNAC5 missense variant cDNA molecule is set forth in SEQ ID NO:28.

[0176] Another ST6GALNAC5 missense variant cDNA molecule exists, wherein the thymine at position 562 is replaced with a cytosine. The nucleotide sequence of this ST6GALNAC5 missense variant cDNA molecule is set forth in SEQ ID NO:29.

[0177] Another ST6GALNAC5 missense variant cDNA molecule exists, wherein the thymine at position 515 is replaced with a cytosine. The nucleotide sequence of this ST6GALNAC5 missense variant cDNA molecule is set forth in SEQ ID NO:30.

[0178] Another ST6GALNAC5 missense variant cDNA molecule exists, wherein the thymine at position 579 is replaced with a cytosine. The nucleotide sequence of this ST6GALNAC5 missense variant cDNA molecule is set forth in SEQ ID NO:31.

[0179] Another ST6GALNAC5 missense variant cDNA molecule exists, wherein the thymine at position 416 is replaced with a cytosine. The nucleotide sequence of this ST6GALNAC5 missense variant cDNA molecule is set forth in SEQ ID NO:32.

[0180] Another ST6GALNAC5 missense variant cDNA molecule exists, wherein the thymine at position 639 is replaced with a cytosine. The nucleotide sequence of this ST6GALNAC5 missense variant cDNA molecule is set forth in SEQ ID NO:33.

[0181] Another ST6GALNAC5 missense variant cDNA molecule exists, wherein the thymine at position 600 is replaced with a cytosine. The nucleotide sequence of this ST6GALNAC5 missense variant cDNA molecule is set forth in SEQ ID NO:34.

[0182] The genomic nucleic acid molecules, mRNA molecules, and cDNA molecules can be from any organism. For example, the genomic nucleic acid molecules, mRNA molecules, and cDNA molecules can be human or an ortholog from another organism, such as a non-human mammal, a rodent, a mouse, or a rat. It is understood that gene sequences within a population can vary due to polymorphisms such as single-nucleotide polymorphisms. The examples provided herein are only exemplary sequences. Other sequences are also possible.

[0183] Also provided herein are functional polynucleotides that can interact with the disclosed nucleic acid molecules. Examples of functional polynucleotides include, but are not limited to, antisense molecules, aptamers, ribozymes, triplex forming molecules, and external guide sequences. The functional polynucleotides can act as effectors, inhibitors, modulators, and stimulators of a specific activity possessed by a target molecule, or the functional polynucleotides can possess a de novo activity independent of any other molecules.

[0184] The isolated nucleic acid molecules disclosed herein can comprise RNA, DNA, or both RNA and DNA. The isolated nucleic acid molecules can also be linked or fused to a heterologous nucleic acid sequence, such as in a vector, or a heterologous label. For example, the isolated nucleic acid molecules disclosed herein can be within a vector or as an exogenous donor sequence comprising the isolated nucleic acid molecule and a heterologous nucleic acid sequence. The isolated nucleic acid molecules can also be linked or fused to a heterologous label. The label can be directly detectable (such as, for example, fluorophore) or indirectly detectable (such as, for example, hapten, enzyme, or fluorophore quencher). Such labels can be detectable by spectroscopic, photochemical, biochemical, immunochemical, or chemical means. Such labels include, for example, radiolabels, pigments, dyes, chromogens, spin labels, and fluorescent labels. The label can also be, for example, a chemiluminescent substance; a metal-containing substance; or an enzyme, where there occurs an enzyme-dependent secondary generation of signal. The term “label” can also refer to a “tag” or hapten that can bind selectively to a conjugated molecule such that the conjugated molecule, when added subsequently along with a substrate, is used to generate a detectable signal. For example, biotin can be used as a tag along with an avidin or streptavidin conjugate of horseradish peroxidate (HRP) to bind to the tag, and examined using a calorimetric substrate (such as, for example, tetramethylbenzidine (TMB)) or a fluorogenic substrate to detect the presence of HRP. Exemplary labels that can be used as tags to facilitate purification include, but are not limited to, myc, HA, FLAG or 3×FLAG, 6×His or polyhistidine, glutathione-S-transferase (GST), maltose binding protein, an epitope tag, or the Fc portion of immunoglobulin. Numerous labels include, for example, particles, fluorophores, haptens, enzymes and their calorimetric, fluorogenic and chemiluminescent substrates and other labels.

[0185] The isolated nucleic acid molecules, or the complement thereof, can also be present within a host cell. In some embodiments, the host cell can comprise the vector that comprises any of the nucleic acid molecules described herein, or the complement thereof. In some embodiments, the nucleic acid molecule is operably linked to a promoter active in the host cell. In some embodiments, the promoter is an exogenous promoter. In some embodiments, the promoter is an inducible promoter. In some embodiments, the host cell is a bacterial cell, a yeast cell, an insect cell, or a mammalian cell. In some embodiments, the host cell is a bacterial cell. In some embodiments, the host cell is a yeast cell. In some embodiments, the host cell is an insect cell. In some embodiments, the host cell is a mammalian cell.

[0186] The disclosed nucleic acid molecules can comprise, for example, nucleotides or non-natural or modified nucleotides, such as nucleotide analogs or nucleotide substitutes. Such nucleotides include a nucleotide that contains a modified base, sugar, or phosphate group, or that incorporates a non-natural moiety in its structure. Examples of non-natural nucleotides include, but are not limited to, dideoxynucleotides, biotinylated, aminated, deaminated, alkylated, benzylated, and fluorophor-labeled nucleotides.

[0187] The nucleic acid molecules disclosed herein can also comprise one or more nucleotide analogs or substitutions. A nucleotide analog is a nucleotide which contains a modification to either the base, sugar, or phosphate moieties. Modifications to the base moiety include, but are not limited to, natural and synthetic modifications of A, C, G, and T/U, as well as different purine or pyrimidine bases such as, for example, pseudouridine, uracil-5-yl, hypoxanthin-9-yl (I), and 2-aminoadenin-9-yl. Modified bases include, but are not limited to, 5-methylcytosine (5-me-C), 5-hydroxymethyl cytosine, xanthine, hypoxanthine, 2-aminoadenine, 6-methyl and other alkyl derivatives of adenine and guanine, 2-propyl and other alkyl derivatives of adenine and guanine, 2-thiouracil, 2-thiothymine and 2-thiocytosine, 5-halouracil and cytosine, 5-propynyl uracil and cytosine, 6-azo uracil, cytosine and thymine, 5-uracil (pseudouracil), 4-thiouracil, 8-halo, 8-amino, 8-thiol, 8-thioalkyl, 8-hydroxyl and other 8-substituted adenines and guanines, 5-halo (such as, for example, 5-bromo), 5-trifluoromethyl and other 5-substituted uracils and cytosines, 7-methylguanine, 7-methyladenine, 8-azaguanine, 8-azaadenine, 7-deazaguanine, 7-deazaadenine, 3-deazaguanine, and 3-deazaadenine.

[0188] Nucleotide analogs can also include modifications of the sugar moiety. Modifications to the sugar moiety include, but are not limited to, natural modifications of the ribose and deoxy ribose as well as synthetic modifications. Sugar modifications include, but are not limited to, the following modifications at the 2′ position: OH; F; O-, S-, or N-alkyl; O-, S-, or N-alkenyl; O-, S- or N-alkynyl; or O-alkyl-O-alkyl, wherein the alkyl, alkenyl, and alkynyl may be substituted or unsubstituted C₁₋₁₀alkyl or C₂₋₁₀alkenyl, and C₂₋₁₀alkynyl. Exemplary 2′ sugar modifications also include, but are not limited to, —O[(CH₂)ₙO]ₘCH₃, —O(CH₂)ₙOCH₃, —O(CH₂)ₙNH₂, —O(CH₂)ₙCH₃, —O(CH₂)ₙ—ONH₂, and —O(CH₂)ₙON[(CH₂)ₙCH₃)]₂, where n and m, independently, are from 1 to about 10. Other modifications at the 2′ position include, but are not limited to, C₁₋₁₀alkyl, substituted lower alkyl, alkaryl, aralkyl, O-alkaryl or O-aralkyl, SH, SCH₃, OCN, Cl, Br, CN, CF₃, OCF₃, SOCH₃, SO₂CH₃, ONO₂, NO₂, N₃, NH₂, heterocycloalkyl, heterocycloalkaryl, aminoalkylamino, polyalkylamino, substituted silyl, an RNA cleaving group, a reporter group, an intercalator, a group for improving the pharmacokinetic properties of an oligonucleotide, or a group for improving the pharmacodynamic properties of an oligonucleotide, and other substituents having similar properties. Similar modifications may also be made at other positions on the sugar, particularly the 3′ position of the sugar on the 3′ terminal nucleotide or in 2′-5′ linked oligonucleotides and the 5′ position of 5′ terminal nucleotide. Modified sugars can also include those that contain modifications at the bridging ring oxygen, such as CH₂ and S. Nucleotide sugar analogs can also have sugar mimetics, such as cyclobutyl moieties in place of the pentofuranosyl sugar.

[0189] Nucleotide analogs can also be modified at the phosphate moiety. Modified phosphate moieties include, but are not limited to, those that can be modified so that the linkage between two nucleotides contains a phosphorothioate, chiral phosphorothioate, phosphorodithioate, phosphotriester, aminoalkylphosphotriester, methyl and other alkyl phosphonates including 3′-alkylene phosphonate and chiral phosphonates, phosphinates, phosphoramidates including 3′-amino phosphoramidate and aminoalkylphosphoramidates, thionophosphoramidates, thionoalkylphosphonates, thionoalkylphosphotriesters, and boranophosphates. These phosphate or modified phosphate linkage between two nucleotides can be through a 3′-5′ linkage or a 2′-5′ linkage, and the linkage can contain inverted polarity such as 3′-5′ to 5′-3′ or 2′-5′ to 5′-2′. Various salts, mixed salts, and free acid forms are also included. Nucleotide substitutes also include peptide nucleic acids (PNAs).

[0190] The present disclosure also provides vectors comprising any one or more of the nucleic acid molecules disclosed herein. In some embodiments, the vectors comprise any one or more of the nucleic acid molecules disclosed herein and a heterologous nucleic acid. The vectors can be viral or nonviral vectors capable of transporting a nucleic acid molecule. In some embodiments, the vector is a plasmid or cosmid (such as, for example, a circular double-stranded DNA into which additional DNA segments can be ligated). In some embodiments, the vector is a viral vector, wherein additional DNA segments can be ligated into the viral genome. Expression vectors include, but are not limited to, plasmids, cosmids, retroviruses, adenoviruses, adeno-associated viruses (AAV), plant viruses such as cauliflower mosaic virus and tobacco mosaic virus, yeast artificial chromosomes (YACs), Epstein-Barr (EBV)-derived episomes, and other expression vectors known in the art.

[0191] Desired regulatory sequences for mammalian host cell expression can include, for example, viral elements that direct high levels of polypeptide expression in mammalian cells, such as promoters and/or enhancers derived from retroviral LTRs, cytomegalovirus (CMV) (such as, for example, CMV promoter/enhancer), Simian Virus 40 (SV40) (such as, for example, SV40 promoter/enhancer), adenovirus, (such as, for example, the adenovirus major late promoter (AdMLP)), polyoma and strong mammalian promoters such as native immunoglobulin and actin promoters. Methods of expressing polypeptides in bacterial cells or fungal cells (such as, for example, yeast cells) are also well known. A promoter can be, for example, a constitutively active promoter, a conditional promoter, an inducible promoter, a temporally restricted promoter (such as, for example, a developmentally regulated promoter), or a spatially restricted promoter (such as, for example, a cell-specific or tissue-specific promoter).

[0192] Percent identity (or percent complementarity) between particular stretches of nucleotide sequences within nucleic acid molecules or amino acid sequences within polypeptides can be determined routinely using BLAST programs (basic local alignment search tools) and PowerBLAST programs (Altschul et al., J. Mol. Biol., 1990, 215, 403-410; Zhang and Madden, Genome Res., 1997, 7, 649-656) or by using the Gap program (Wisconsin Sequence Analysis Package, Version 8 for Unix, Genetics Computer Group, University Research Park, Madison Wis.), using default settings, which uses the algorithm of Smith and Waterman (Adv. Appl. Math., 1981, 2, 482-489). Herein, if reference is made to percent sequence identity, the higher percentages of sequence identity are preferred over the lower ones.

[0193] The present disclosure also provides compositions comprising any one or more of the isolated nucleic acid molecules, genomic nucleic acid molecules, mRNA molecules, and/or cDNA molecules disclosed herein. In some embodiments, the composition is a pharmaceutical composition. In some embodiments, the compositions comprise a carrier and/or excipient. Examples of carriers include, but are not limited to, poly(lactic acid) (PLA) microspheres, poly(D,L-lactic-coglycolic-acid) (PLGA) microspheres, liposomes, micelles, inverse micelles, lipid cochleates, and lipid microtubules. A carrier may comprise a buffered salt solution such as PBS, HBSS, etc.

[0194] As used herein, the phrase “corresponding to” or grammatical variations thereof when used in the context of the numbering of a particular nucleotide or nucleotide sequence or position refers to the numbering of a specified reference sequence when the particular nucleotide or nucleotide sequence is compared to a reference sequence (such as, for example, SEQ ID NO:1, SEQ ID NO:3, or SEQ ID NO:19). In other words, the residue (such as, for example, nucleotide or amino acid) number or residue (such as, for example, nucleotide or amino acid) position of a particular polymer is designated with respect to the reference sequence rather than by the actual numerical position of the residue within the particular nucleotide or nucleotide sequence. For example, a particular nucleotide sequence can be aligned to a reference sequence by introducing gaps to optimize residue matches between the two sequences. In these cases, although the gaps are present, the numbering of the residue in the particular nucleotide or nucleotide sequence is made with respect to the reference sequence to which it has been aligned.

[0195] For example, an ST6GALNAC5 missense nucleic acid molecule comprising a nucleotide sequence encoding an ST6GALNAC5 predicted loss-of-function polypeptide, wherein the nucleotide sequence comprises a cytosine at a position corresponding to position 176,867 according to SEQ ID NO:2 means that if the nucleotide sequence of the ST6GALNAC5 genomic nucleic acid molecule is aligned to the sequence of SEQ ID NO:2, the ST6GALNAC5 sequence has a cytosine residue at the position that corresponds to position 176,867 of SEQ ID NO:2. The same applies for an ST6GALNAC5 missense mRNA molecules comprising a nucleotide sequence encoding an ST6GALNAC5 predicted loss-of-function polypeptide, wherein the nucleotide sequence comprises a cytosine at a position corresponding to position 600 according to SEQ ID NO:11, and an ST6GALNAC5 missense cDNA molecules comprising a nucleotide sequence encoding an ST6GALNAC5 predicted loss-of-function polypeptide, wherein the nucleotide sequence comprises a cytosine at a position corresponding to position 600 according to SEQ ID NO:27. In other words, these phrases refer to a nucleic acid molecule encoding an ST6GALNAC5 polypeptide, wherein the genomic nucleic acid molecule has a nucleotide sequence that comprises a cytosine residue that is homologous to the cytosine residue at position 176,867 of SEQ ID NO:2 (or wherein the mRNA molecule has a nucleotide sequence that comprises a cytosine residue that is homologous to the cytosine residue at position 600 of SEQ ID NO:11, or wherein the cDNA molecule has a nucleotide sequence that comprises a cytosine residue that is homologous to the cytosine residue at position 600 of SEQ ID NO:27).

[0196] As described herein, a position within an ST6GALNAC5 missense genomic nucleic acid molecule that corresponds to position 176,867 according to SEQ ID NO:2, for example, can be identified by performing a sequence alignment between the nucleotide sequence of a particular ST6GALNAC5 nucleic acid molecule and the nucleotide sequence of SEQ ID NO:2. A variety of computational algorithms exist that can be used for performing a sequence alignment to identify a nucleotide position that corresponds to, for example, position 176,867 in SEQ ID NO:2. For example, by using the NCBI BLAST algorithm (Altschul et al., Nucleic Acids Res., 1997, 25, 3389-3402) or CLUSTALW software (Sievers and Higgins, Methods Mol. Biol., 2014, 1079, 105-116) sequence alignments may be performed. However, sequences can also be aligned manually.

[0197] The amino acid sequences of ST6GALNAC5 reference polypeptides are set forth in SEQ ID NO:35 (Isoform 1), SEQ ID NO:36 (Isoform 2), SEQ ID NO:37 (Isoform 3), and SEQ ID NO:38 (Isoform 4). Referring to SEQ ID NO:35 (Isoform 1), the ST6GALNAC5 reference polypeptide is 336 amino acids in length. Referring to SEQ ID NO:35, position 135 is a valine. Referring to SEQ ID NO:36 (Isoform 2), the ST6GALNAC5 reference polypeptide is 146 amino acids in length. Referring to SEQ ID NO:36, position 45 is a valine. Referring to SEQ ID NO:37 (Isoform 3), the ST6GALNAC5 reference polypeptide is 246 amino acids in length. Referring to SEQ ID NO:37, position 45 is a valine. Referring to SEQ ID NO:38 (Isoform 4), the ST6GALNAC5 reference polypeptide is 236 amino acids in length. Referring to SEQ ID NO:38, position 135 is a valine.

[0198] The amino acid sequences of ST6GALNAC5 predicted loss-of-function polypeptides are set forth in SEQ ID NO:39 (Isoform 1; Val135A1a), SEQ ID NO:40 (Isoform 2; Val45A1a), SEQ ID NO:41 (Isoform 3; Val45A1a*), and SEQ ID NO:42 (Isoform 4; Val135A1a*). Referring to SEQ ID NO:39, position 135 is an alanine. Referring to SEQ ID NO:40, position 45 is an alanine. Referring to SEQ ID NO:41, position 45 is an alanine. Referring to SEQ ID NO:42, position 135 is an alanine.

[0199] The nucleotide and amino acid sequences listed in the accompanying sequence listing are shown using standard letter abbreviations for nucleotide bases, and three-letter code for amino acids. The nucleotide sequences follow the standard convention of beginning at the 5′ end of the sequence and proceeding forward (i.e., from left to right in each line) to the 3′ end. Only one strand of each nucleotide sequence is shown, but the complementary strand is understood to be included by any reference to the displayed strand. The amino acid sequence follows the standard convention of beginning at the amino terminus of the sequence and proceeding forward (i.e., from left to right in each line) to the carboxy terminus.

[0200] The present disclosure also provides therapeutic agents that treat or prevent cognitive impairment for use in the treatment of cognitive impairment (or for use in the preparation of a medicament for treating cognitive impairment) in a subject, wherein the subject has any of the ST6GALNAC5 missense variant genomic nucleic acid molecules, missense variant mRNA molecules, and/or missense variant cDNA molecules encoding an ST6GALNAC5 predicted loss-of-function polypeptide described herein. The therapeutic agents that treat or prevent cognitive impairment can be any of the therapeutic agents that treat or prevent cognitive impairment described herein.

[0201] In some embodiments, the subject is identified as having a genomic nucleic acid molecule encoding an ST6GALNAC5 predicted loss-of-function polypeptide, wherein the genomic nucleic acid molecule has a nucleotide sequence comprising a cytosine at a position corresponding to position 176,867 according to SEQ ID NO:2, or the complement thereof.

[0202] In some embodiments, the subject is identified as having an mRNA molecule encoding an ST6GALNAC5 predicted loss-of-function polypeptide, wherein the mRNA molecule has a nucleotide sequence comprising: a cytosine at a position corresponding to position 600 according to SEQ ID NO:11, or the complement thereof; a cytosine at a position corresponding to position 639 according to SEQ ID NO:12, or the complement thereof; a cytosine at a position corresponding to position 562 according to SEQ ID NO:13, or the complement thereof; a cytosine at a position corresponding to position 515 according to SEQ ID NO:14, or the complement thereof; a cytosine at a position corresponding to position 579 according to SEQ ID NO:15, or the complement thereof; a cytosine at a position corresponding to position 416 according to SEQ ID NO:16, or the complement thereof; a cytosine at a position corresponding to position 639 according to SEQ ID NO:17, or the complement thereof; or a cytosine at a position corresponding to position 600 according to SEQ ID NO:18, or the complement thereof.

[0203] In some embodiments, the subject is identified as having a cDNA molecule encoding an ST6GALNAC5 predicted loss-of-function polypeptide, wherein the cDNA molecule has a nucleotide sequence comprising: a cytosine at a position corresponding to position 600 according to SEQ ID NO:27, or the complement thereof; a cytosine at a position corresponding to position 639 according to SEQ ID NO:28, or the complement thereof; a cytosine at a position corresponding to position 562 according to SEQ ID NO:29, or the complement thereof; a cytosine at a position corresponding to position 515 according to SEQ ID NO:30, or the complement thereof; a cytosine at a position corresponding to position 579 according to SEQ ID NO:31, or the complement thereof; a cytosine at a position corresponding to position 416 according to SEQ ID NO:32, or the complement thereof; a cytosine at a position corresponding to position 639 according to SEQ ID NO:33, or the complement thereof; or a cytosine at a position corresponding to position 600 according to SEQ ID NO:34, or the complement thereof.

[0204] In some embodiments, the subject is identified as having: i) a genomic nucleic acid molecule having a nucleotide sequence encoding an ST6GALNAC5 predicted loss-of-function polypeptide, wherein the nucleotide sequence comprises a cytosine at a position corresponding to position 176,867 according to SEQ ID NO:2, or the complement thereof; ii) an mRNA molecule having a nucleotide sequence encoding an ST6GALNAC5 predicted loss-of-function polypeptide, wherein the nucleotide sequence comprises: a cytosine at a position corresponding to position 600 according to SEQ ID NO:11, or the complement thereof; a cytosine at a position corresponding to position 639 according to SEQ ID NO:12, or the complement thereof; a cytosine at a position corresponding to position 562 according to SEQ ID NO:13, or the complement thereof; a cytosine at a position corresponding to position 515 according to SEQ ID NO:14, or the complement thereof; a cytosine at a position corresponding to position 579 according to SEQ ID NO:15, or the complement thereof; a cytosine at a position corresponding to position 416 according to SEQ ID NO:16, or the complement thereof; a cytosine at a position corresponding to position 639 according to SEQ ID NO:17, or the complement thereof; or a cytosine at a position corresponding to position 600 according to SEQ ID NO:18, or the complement thereof; or iii) a cDNA molecule having a nucleotide sequence encoding an ST6GALNAC5 predicted loss-of-function polypeptide, wherein the nucleotide sequence comprises: a cytosine at a position corresponding to position 600 according to SEQ ID NO:27, or the complement thereof; a cytosine at a position corresponding to position 639 according to SEQ ID NO:28, or the complement thereof; a cytosine at a position corresponding to position 562 according to SEQ ID NO:29, or the complement thereof; a cytosine at a position corresponding to position 515 according to SEQ ID NO:30, or the complement thereof; a cytosine at a position corresponding to position 579 according to SEQ ID NO:31, or the complement thereof; a cytosine at a position corresponding to position 416 according to SEQ ID NO:32, or the complement thereof; a cytosine at a position corresponding to position 639 according to SEQ ID NO:33, or the complement thereof; or a cytosine at a position corresponding to position 600 according to SEQ ID NO:34, or the complement thereof.

[0205] In some embodiments, the subject is identified as having a genomic nucleic acid molecule having a nucleotide sequence encoding an ST6GALNAC5 predicted loss-of-function polypeptide, wherein the nucleotide sequence comprises a cytosine at a position corresponding to position 176,867 according to SEQ ID NO:2, or the complement thereof.

[0206] In some embodiments, the subject is identified as having an mRNA molecule having a nucleotide sequence encoding an ST6GALNAC5 predicted loss-of-function polypeptide, wherein the nucleotide sequence comprises: a cytosine at a position corresponding to position 600 according to SEQ ID NO:11, or the complement thereof; a cytosine at a position corresponding to position 639 according to SEQ ID NO:12, or the complement thereof; a cytosine at a position corresponding to position 562 according to SEQ ID NO:13, or the complement thereof; a cytosine at a position corresponding to position 515 according to SEQ ID NO:14, or the complement thereof; a cytosine at a position corresponding to position 579 according to SEQ ID NO:15, or the complement thereof; a cytosine at a position corresponding to position 416 according to SEQ ID NO:16, or the complement thereof; a cytosine at a position corresponding to position 639 according to SEQ ID NO:17, or the complement thereof; or a cytosine at a position corresponding to position 600 according to SEQ ID NO:18, or the complement thereof.

[0207] In some embodiments, the subject is identified as having a cDNA molecule having a nucleotide sequence encoding an ST6GALNAC5 predicted loss-of-function polypeptide, wherein the nucleotide sequence comprises: a cytosine at a position corresponding to position 600 according to SEQ ID NO:27, or the complement thereof; a cytosine at a position corresponding to position 639 according to SEQ ID NO:28, or the complement thereof; a cytosine at a position corresponding to position 562 according to SEQ ID NO:29, or the complement thereof; a cytosine at a position corresponding to position 515 according to SEQ ID NO:30, or the complement thereof; a cytosine at a position corresponding to position 579 according to SEQ ID NO:31, or the complement thereof; a cytosine at a position corresponding to position 416 according to SEQ ID NO:32, or the complement thereof; a cytosine at a position corresponding to position 639 according to SEQ ID NO:33, or the complement thereof; or a cytosine at a position corresponding to position 600 according to SEQ ID NO:34, or the complement thereof.

[0208] In some embodiments, the subject is identified as having an ST6GALNAC5 predicted loss-of-function polypeptide that comprises: an alanine at a position corresponding to position 135 according to SEQ ID NO:39, an alanine at a position corresponding to position 45 according to SEQ ID NO:40, an alanine at a position corresponding to position 45 according to SEQ ID NO:41, or an alanine at a position corresponding to position 135 according to SEQ ID NO:42.

[0209] The present disclosure also provides ST6GALNAC5 inhibitors for use in the treatment of cognitive impairment (or for use in the preparation of a medicament for treating cognitive impairment) in a subject, wherein the subject is heterozygous for any of the ST6GALNAC5 missense variant genomic nucleic acid molecules, missense variant mRNA molecules, and/or missense variant cDNA molecules encoding an ST6GALNAC5 predicted loss-of-function polypeptide described herein, or wherein the subject is reference for an ST6GALNAC5 genomic nucleic acid molecule, mRNA molecule, or cDNA molecule. The ST6GALNAC5 inhibitors can be any of the ST6GALNAC5 inhibitors described herein.

[0210] In some embodiments, the subject is reference for an ST6GALNAC5 genomic nucleic acid molecule, an ST6GALNAC5 mRNA molecule, or an ST6GALNAC5 cDNA molecule. In some embodiments, the subject is reference for an ST6GALNAC5 genomic nucleic acid molecule. In some embodiments, the subject is reference for an ST6GALNAC5 mRNA molecule. In some embodiments, the subject is reference for an ST6GALNAC5 cDNA molecule.

[0211] In some embodiments, the subject is identified as being heterozygous for a genomic nucleic acid molecule encoding an ST6GALNAC5 predicted loss-of-function polypeptide, wherein the genomic nucleic acid molecule has a nucleotide sequence comprising a cytosine at a position corresponding to position 176,867 according to SEQ ID NO:2, or the complement thereof.

[0212] In some embodiments, the subject is identified as being heterozygous for an mRNA molecule encoding an ST6GALNAC5 predicted loss-of-function polypeptide, wherein the mRNA molecule has a nucleotide sequence comprising: a cytosine at a position corresponding to position 600 according to SEQ ID NO:11, or the complement thereof; a cytosine at a position corresponding to position 639 according to SEQ ID NO:12, or the complement thereof; a cytosine at a position corresponding to position 562 according to SEQ ID NO:13, or the complement thereof; a cytosine at a position corresponding to position 515 according to SEQ ID NO:14, or the complement thereof; a cytosine at a position corresponding to position 579 according to SEQ ID NO:15, or the complement thereof; a cytosine at a position corresponding to position 416 according to SEQ ID NO:16, or the complement thereof; a cytosine at a position corresponding to position 639 according to SEQ ID NO:17, or the complement thereof; or a cytosine at a position corresponding to position 600 according to SEQ ID NO:18, or the complement thereof.

[0213] In some embodiments, the subject is identified as being heterozygous for a cDNA molecule encoding an ST6GALNAC5 predicted loss-of-function polypeptide, wherein the cDNA molecule has a nucleotide sequence comprising: a cytosine at a position corresponding to position 600 according to SEQ ID NO:27, or the complement thereof; a cytosine at a position corresponding to position 639 according to SEQ ID NO:28, or the complement thereof; a cytosine at a position corresponding to position 562 according to SEQ ID NO:29, or the complement thereof; a cytosine at a position corresponding to position 515 according to SEQ ID NO:30, or the complement thereof; a cytosine at a position corresponding to position 579 according to SEQ ID NO:31, or the complement thereof; a cytosine at a position corresponding to position 416 according to SEQ ID NO:32, or the complement thereof; a cytosine at a position corresponding to position 639 according to SEQ ID NO:33, or the complement thereof; or a cytosine at a position corresponding to position 600 according to SEQ ID NO:34, or the complement thereof.

[0214] In some embodiments, the subject is identified as being heterozygous for: i) a genomic nucleic acid molecule having a nucleotide sequence encoding an ST6GALNAC5 predicted loss-of-function polypeptide, wherein the nucleotide sequence comprises a cytosine at a position corresponding to position 176,867 according to SEQ ID NO:2, or the complement thereof; ii) an mRNA molecule having a nucleotide sequence encoding an ST6GALNAC5 predicted loss-of-function polypeptide, wherein the nucleotide sequence comprises: a cytosine at a position corresponding to position 600 according to SEQ ID NO:11, or the complement thereof; a cytosine at a position corresponding to position 639 according to SEQ ID NO:12, or the complement thereof; a cytosine at a position corresponding to position 562 according to SEQ ID NO:13, or the complement thereof; a cytosine at a position corresponding to position 515 according to SEQ ID NO:14, or the complement thereof; a cytosine at a position corresponding to position 579 according to SEQ ID NO:15, or the complement thereof; a cytosine at a position corresponding to position 416 according to SEQ ID NO:16, or the complement thereof; a cytosine at a position corresponding to position 639 according to SEQ ID NO:17, or the complement thereof; or a cytosine at a position corresponding to position 600 according to SEQ ID NO:18, or the complement thereof; or iii) a cDNA molecule having a nucleotide sequence encoding an ST6GALNAC5 predicted loss-of-function polypeptide, wherein the nucleotide sequence comprises: a cytosine at a position corresponding to position 600 according to SEQ ID NO:27, or the complement thereof; a cytosine at a position corresponding to position 639 according to SEQ ID NO:28, or the complement thereof; a cytosine at a position corresponding to position 562 according to SEQ ID NO:29, or the complement thereof; a cytosine at a position corresponding to position 515 according to SEQ ID NO:30, or the complement thereof; a cytosine at a position corresponding to position 579 according to SEQ ID NO:31, or the complement thereof; a cytosine at a position corresponding to position 416 according to SEQ ID NO:32, or the complement thereof; a cytosine at a position corresponding to position 639 according to SEQ ID NO:33, or the complement thereof; or a cytosine at a position corresponding to position 600 according to SEQ ID NO:34, or the complement thereof.

[0215] In some embodiments, the subject is identified as being heterozygous for a genomic nucleic acid molecule having a nucleotide sequence encoding an ST6GALNAC5 predicted loss-of-function polypeptide, wherein the nucleotide sequence comprises a cytosine at a position corresponding to position 176,867 according to SEQ ID NO:2, or the complement thereof.

[0216] In some embodiments, the subject is identified as being heterozygous for an mRNA molecule having a nucleotide sequence encoding an ST6GALNAC5 predicted loss-of-function polypeptide, wherein the nucleotide sequence comprises: a cytosine at a position corresponding to position 600 according to SEQ ID NO:11, or the complement thereof; a cytosine at a position corresponding to position 639 according to SEQ ID NO:12, or the complement thereof; a cytosine at a position corresponding to position 562 according to SEQ ID NO:13, or the complement thereof; a cytosine at a position corresponding to position 515 according to SEQ ID NO:14, or the complement thereof; a cytosine at a position corresponding to position 579 according to SEQ ID NO:15, or the complement thereof; a cytosine at a position corresponding to position 416 according to SEQ ID NO:16, or the complement thereof; a cytosine at a position corresponding to position 639 according to SEQ ID NO:17, or the complement thereof; or a cytosine at a position corresponding to position 600 according to SEQ ID NO:18, or the complement thereof.

[0217] In some embodiments, the subject is identified as being heterozygous for a cDNA molecule having a nucleotide sequence encoding an ST6GALNAC5 predicted loss-of-function polypeptide, wherein the nucleotide sequence comprises: a cytosine at a position corresponding to position 600 according to SEQ ID NO:27, or the complement thereof; a cytosine at a position corresponding to position 639 according to SEQ ID NO:28, or the complement thereof; a cytosine at a position corresponding to position 562 according to SEQ ID NO:29, or the complement thereof; a cytosine at a position corresponding to position 515 according to SEQ ID NO:30, or the complement thereof; a cytosine at a position corresponding to position 579 according to SEQ ID NO:31, or the complement thereof; a cytosine at a position corresponding to position 416 according to SEQ ID NO:32, or the complement thereof; a cytosine at a position corresponding to position 639 according to SEQ ID NO:33, or the complement thereof; or a cytosine at a position corresponding to position 600 according to SEQ ID NO:34, or the complement thereof.

[0218] All patent documents, websites, other publications, accession numbers and the like cited above or below are incorporated by reference in their entirety for all purposes to the same extent as if each individual item were specifically and individually indicated to be so incorporated by reference. If different versions of a sequence are associated with an accession number at different times, the version associated with the accession number at the effective filing date of this application is meant. The effective filing date means the earlier of the actual filing date or filing date of a priority application referring to the accession number if applicable. Likewise, if different versions of a publication, website or the like are published at different times, the version most recently published at the effective filing date of the application is meant unless otherwise indicated. Any feature, step, element, embodiment, or aspect of the present disclosure can be used in combination with any other feature, step, element, embodiment, or aspect unless specifically indicated otherwise. Although the present disclosure has been described in some detail by way of illustration and example for purposes of clarity and understanding, it will be apparent that certain changes and modifications may be practiced within the scope of the appended claims.

[0219] The following examples are provided to describe the embodiments in greater detail. They are intended to illustrate, not to limit, the claimed embodiments. The following examples provide those of ordinary skill in the art with a disclosure and description of how the compounds, compositions, articles, devices and/or methods described herein are made and evaluated, and are intended to be purely exemplary and are not intended to limit the scope of any claims. Efforts have been made to ensure accuracy with respect to numbers (such as, for example, amounts, temperature, etc.), but some errors and deviations may be accounted for. Unless indicated otherwise, parts are parts by weight, temperature is in ° C. or is at ambient temperature, and pressure is at or near atmospheric.

### EXAMPLES

### Example 1: Rare Variant Associations with Brain Imaging Traits

[0220] The exomes of 454,787 UKB study participants were sequenced, with 95.8% of targeted bases covered at a depth of 20× or greater, as previously described (Szustakowski, Advancing Human Genetics Research and Drug Discovery through Exome Sequencing of the UK Biobank. bioRxiv, 2021; and Van Hout et al., Nature, 2020). Twelve million variants were identified in 39 million base pairs across the coding regions of 18,659 genes (data not shown). Among the variants identified were 3,375,252 (median of 10,260 per individual) synonymous 7,689,495 (9,284 per individual) missense and 889,957 (212 per individual) putative loss-of-function (pLOF) variants (data not shown), of which about half were observed only once in this dataset (singleton variants; data not shown).

[0221] An imaging component of the UK Biobank was analyzed that included 36,968 individuals. An exome-wide association analyses was carried out on 2,077 brain imaging phenotypes derived from magnetic resonance imaging (MRI), conditional upon GWAS signals, to disaggregate the rare variant associations from the common variant signals. Overall, 343 associations with 52 genes were discovered at a P≤10⁻⁷, and 98 associations with seven genes at a more conservative significance threshold of P≤10⁻¹⁰ (data not shown). The strongest trait-increasing association with GWC was with a deleterious missense variant in ST6GALNAC5 (r5756654226, 9 carriers; effect=1.7 SD units, 95% Cl 1.1 to 2.4, P=8.2×10⁻⁸). This aligns with current evidence that the relative abundance of specific gangliosides in the brain changes with age and in common neurological conditions, including Huntington's disease, Alzheimer's disease, Parkinson's disease, amyotrophic lateral sclerosis, stroke, multiple sclerosis and epilepsy.

[0222] Various modifications of the described subject matter, in addition to those described herein, will be apparent to those skilled in the art from the foregoing description. Such modifications are also intended to fall within the scope of the appended claims. Each reference (including, but not limited to, journal articles, U.S. and non-U.S. patents, patent application publications, international patent application publications, gene bank accession numbers, and the like) cited in the present application is incorporated herein by reference in its entirety and for all purposes.

The application's sequence listing, which the Patent Office published only in electronic form, follows.

SEQUENCE LISTING (62 sequences)

SEQ ID NO: 1 - DNA, 200067 bp, homo sapien
agttttaattctgtctctaatctctgcaacagccgcgcttcccgggtcccgcggctcccgcgcgcgatctgccgcggccggctgctgggcaaaaatcagagccgcctccgccccattacccatcatggaaaccctccaggaaaaagtggccccggacgcgcgagcctgaggattctgcacaaaagaggtgcccaaaatgaagaccctgatggtgagtcagttgtggcaactccaccgggcaaagagggggatccccgggctcagggtccacgggacgcaccgtggagactccgagacgcctaaccctgggccgcgaggtcgcctgttacaaagggacaactttctacccgctccgcgttccctcccgattctccagctctgcctggctcggaatcccagagccaggatgggaactcggggttgcctcgcctcctagatctccggcgagaggtccgagggggtggcggagagctgcaggagcgatggaggagtgggcagattgctcaagggatgggggtgcccaaaagcaacagcctgccaaaaactaagagggacggggaggggggacctttgcagactttcttcgttttcttagatttcaaacttgcaaggatcgcaaggatccagggccccaggaaaggaggggtgtgaaggactcaaaattccagcagcttggctggggtggctgcgccagacgggcccttccccaaagtgcaaacccacccctgtcctcggccccggcgcgctccctccctcagcccggggccgtacaccacctgccctctaccgagagatctgggcggcggcggccgaaagcagcgacgcgcccggagcatcccttgcgatacgctaggggacggtgctttctctgtcccagttgcgtgcggcggggctggggcccaggccgccccaaatctcccccactagagtgaccaccgcacagttgtccccgctgggcgcgctcctccggtgtctgcgctcagccgctctcctcttctctctcccgcccgcccgcagcgccatggtctggcagtgtgtttagcgctcaccaccatgtgcaccagcttgttgctagtgtacagcagcctcggcggccagaaggagcggcccccgcagcagcagcagcagcagcagcaacagcagcagcaggcgtcggccaccggcagctcgcagccggcggcggagagcagcacccagcagcgccccggggtccccgcgggaccgcggccactggacggatacctcggagtggcggaccacaaggtgacagcatgcccgccagcccgctcgccactcagcctggggatcccgcacacctgagccttccccctttcccggggctgggaggcgctgtgagtaggtgccgttcgaaggctggaggggagtggacccgctggggtagggtgggctagttccaacttggtatgaattcttatttggagaaagacacaaagttttgtagaaaataggggtgaggtgcgtggaccccaaagcctaatttcccagcagaaatcggccctggaactagaactccctgatccccagaattgcagctgcggatggaggtccggttcctgaagcctcgggtttggccgccgagtcgctgcctggtgggaggaaactggggttggcgcgggtaccagcctgagcgttcctctgacccggaaccggagggtgagcgcagccagcccgcggccactgctcgggatccagcgttcccctctgatctctccagcgcattgctttgggctgaattctctcagccctggggagtggtgcccaggcaggcatggaagacttgagggacacactcagcttccattggtttgaaactcatcattgtgagcctgtcttcctctgccttccgggaagctgctgcatggggtggctaataactaataagatgaattttttaaaattgggcctcctttccctggaataataaatatctggtttcagtgtgtgaagcctctgggagaatcctaatcaagtttgctgattctgaagatattttaatacagtttaaatgtatccgccattatttgaagctgctcgtatgtttttattaaaacacaattccactctctatctgctttataaagctagaggatttcttgaaatctcccaattattctttttattttactaaattttgtggttgtgaaccgaagtaatatatagtagatgctccttttgtgtgcaaaggtcactctaaccatgcgtgaaaaagccaaactttttaaaaagtggcattcaaaatattgccacacacctgtttaatgcataatgctaaggatttgaaaggtataaaagaatttaaggcaggacccagtcttacggatctttaaatacctgaggacagaacaatataccatgaaatgtgtgtagatggataaaccaatagataaaaatgtgtaataaatgctagatatgaacagtactgtaggggtgcaaaaatgagaacgatgacttccctggaaagatcaaggaaagcttctttgaaaaagtggaattttgcaatgagaagaattcagggaagcaaaaaaggaggaatcaatttcattaggaagtgattatttatttatttatttattgttgtggcaggagcaggggttggggggtaggggtgttagtagacttaaaatccaaaagcagaaggctatcaattttacaattacagcttttgtttccgctcttagttgttgattgattacatgctttgtatctgcatgtgcaagcaaccgataagggctggagttctaggaaagtttagacattagcttctgactgtagatggctgtggtgtttatgtgtaactggtgtatgatggatatactgagatcatggatttccatggctattgtttggtggaaattactgtctaacacttgtgaagctttgattaatggcagcatcaaaaggtaaatttgctgaaagttttgatcagcttttgggaagagatttctaatacttttcttcctgtgttcttctgctggacagacaccagctaagaatattgagagcttaatgcaaagtataataacctaatgcttatgttcaaaacaatgtttattgaccacaaatatgtttgatttcaatttttgtttatcagagctttattttattgaaacaaagaacagtccttttcaatttggagggcgggatgttgataccctacatgggaaattgaaatgatatgtagtaaaagggttttacaaattgtgaagtgctatatgaatgataaatattgtgtgaaagtcattggaattcctagtagaagaaggtctttggagataattatgaatatcaatgaaattatctcatggaacaccaacatctcacaaaattctatacccaaaggttttgagggagttcacgtcaccacaagcaaaggaagaaaggcatatcttaaagtctatgtcttctgtttagacattatcccaattgtcccactgaactaaatgtaaacttctcagaatgccttaactgattctctttaccgctactatttatctggctgcaaattgggcagagttcccttacagatggtcatatgaaggtgcatgtgtaaaatgttgtttatgttctctccaaaagttcctgtttaattaggtttatttgatatcttcctatattcttgcataggcagaggtggaagacattgttagaatattgctaggaatttttttccaattatgacaggggagggtaagaaatgaaagcctttctattcttattatattgccagatgatactcgattgctaatttttttttaccctcacatcaggcctcaggaaaatgatggaatatgctggatgtgatgaccaccaagccatatgctgctgcgtattgaatcagaattccaacagccttttttatctgccattgttttacatagtctggagagagttacagatattatttaggaaaatgttcacacctccatagctggaggccccaaagactgataaatatgtagtgtataagctcagttacatgatgttgttaacattaacagttccaagattaaattcaacaggtggtcctaatccccagcacctgaatttcacaaattacagcctgtctgcaatgatggtcttgtctcatatggctgcagactgaattactgttgagattaaatcactgtgtgcttttgttgaaatatatgctgcaagtcaagtcagtgatgagcggcatgtgttgaggcttaaaatatcacttttcatggtcatattctctacttcctctttcacaaactatgtgagctgcaattgtaatttcagtatcactaaatgaaggctacatggagtttcttgtcataatgaaggcattttctgtttgagtctttctcttctttcccaatccctttccccagaccaattcccacaaatgttccaccaactcatttccatcgtgttacatgtctgtgtcttcaggtactatatctgtattctaacattactctctcagtcccgatttgtggaagccaatgataacaagattgcttaggtacaactgaagaagccaattttcatggctttgggaaccttctgcatttagaactgtagcctaatgtataaccaagctaacacacacacacacacacacacacacacacacacacacacacacacacaccacacacattaaatcaagaaatactcagaggaaagctccaagtcttatagcagaatggaagggaacatggaacacagttcagtttccagtctggatctcgtctgggtagatgaggtcatttgccatctggtagaccctgtgaaatgaaaccgtgagctaattcccatttctagaggacaggctcttatcacagaaggcccactatcacccagactgccctttactgaaatggcttatgaaagggcggtgatcaatggggtctacagctaagcagctatctctttgcttcagaagtagcccccagggatggattttacacataccaataacatacttgtccttggttctttccatttttaggcactcagttattcagacaaatcaaaattgcttagtggtaatagtactattactattaactggtaactatctggttggagtggtaagacaagtgaatgcaagaactgaaaaatagtcatccaaaaccggaatttggataaatgccatctaacttattttaaaattatgggatgagtattccccttttagaaaagtatataaattatcaaacacaagtttacataatttatttgaccacattttatgacatttgagttgtgaatgaatgactgaaatgaatgctaatcatttgaatctcaaggaaattcaaagtgagctaattttcaatgctcaggtattataagatgtaatctgccaatgatgatgaaaccctgttaccacaaagcatcaaacccccaaaatcagaaaaagaacactattttgtgggtgaggagttgcaataatgtagtcacttttaacaggataaatgttttttataacatttattaaaatacttaaccttccttaaatctgtgacagccaggataatttttccaacttcccacatgggtaatttcaagatatcactatcctcctgtaaatggcagatgagtttgaccaggctcactcttaaattccaggcatgctggctttcctgctgatctgtgaacattcattctgcctcaggacctttgcacatgctcttctctcttcctggaaagctcttccccaaggtcttttgcatggttgattccttctggtcattcagtcatcaggtcacatgtcatcttcttatggaccacattctttaactagcccctcctcaacagtcattctctgtcatattagcctgttttattttccttataacacttaacaatatctgaaataatcttaaagtttatttgtctattttctgcccttcccccaactagaatctaagtactgtgacagcaatgtctttgtacatcttgttgaccagtttaaccccaggacctacaacaatatctaaaatttaatgggtacacaataagtatgtatggaaagaaagaagggagtgaaggtggaggagagaaggacagacctacttacctatgtcaacttttttctctacaagaatcatcattgcaatctcaagaccctagtatgtctcatttttccaaaatttgttctgcccacaaaagtaattctaataacagggaggaagaggaggaaatgatttaagaggaaagacaaaagaatctttgggaatgagatttaggggtccatgtttaataagcttcctttttaaatattgcacacattaaactttgagaaacactgtttgaaatgtttttaatcatcacaatgtgtagttctgtagctaattcatttctaggtttttgaactaatcatagcccttggtaaatacttgttgaaggcctagtagtttcaaaattgagcattctggaggaagaacacaatccctaccctcaaagaacctttgatctaatcgttgcagagaaaagacaaagaagcaagaaaagttcaataataaggcaagcactgaataataatttgaaatcaggaagcaataaatcaaggcactgactctaaaaaggagataatttctgtgatctttctccatctataaaacaagttaaattctattattaccttagaagtttgttaagctttcaaactaatattccactctttattagcctcatatctcttcatgcatgtgtgcagggtatccaatgaataattactgaacaaattggatatcaaagcaacttcaaagtggcttgattttaaattcaaaatattgtctctttatgattttcctcggcatgacatagggtcttctgcacttgttaagttaaaccttcttgaatgtctctgtaacatatggtgaccaccttaaccaagctaaatctcataattcattgtactagtcagggttctgtaaagagataaagctaataggatattatattatatatatgggagtttataaagtattaacttacacgatcacagcttcccacaataggctgtctgcaagcttgaggagcaaggagagtcagtctaagtctcaaaactgtagaatttagagtccgatattcaagggcaggaagcgtccagcatgggagaaagatgtaggctgggagactaggcccatctcaccatttcacatttttctgcctgttttatattcgctggaagctgattagattgtgctcatgagattaagggtggctctgccttccccagcgcactgactcaaatgttaatcccttttggcaacacccacgaagacacacccaggattaatactttgtatccttcaatccaatcaagttgacactcagtattaaccatcgcaagtccaccccttgtcaacttgaacccaaacacatctcctgagatcatacataatcttcaaataaagacaataatgaggtcataataatgcctaacataataaaactatccttcatacaactggaaacacaccaacccccaacccaaatactattacaaaaagttatcaatacttaaatgctgatatgcagtcaatacatcttatgtcacatgataaaggaaaaggaaacaaaattaagatattttcttagtacaagtgtatacatgcacaaacgtttttaacagaagaaggaagaaatactcatgacaattacagtcctcgtttctgcagctgctcaagtagctagtaatgattactaccttcttctactactcattgtcttccctttgccttcagcaagcacctcagcaggtcatggttttttttcctggtggagtgacccaagccttcattcctgaggggtctgggtcacttgtagtcctacctggattgggcggttgtaatttcccattgactttaatcacagggcatggtaataacctaatggacaccctaaaggatctcccgtatcccatgcatactctttcttacctccgttgtggagtagtggactgatttcatcttgatagtctgggtcagtcaccccagccaacactgtaactcccttcttagcctgttgacttaaaggtaggaggaacccaaggtgtccaggtggcaatcttaactctcagtttaatggaatcattgttgtgtctccagatggcagcgttcctctctctggagctaagacctctaggacagcagaacattatgttgcaggaacaggaagcaaaacttttgctagtggatcactaggggtgatggtgagtggttccgcttccacttccacctcttgattcctggacccgtgcatcctggctatgggagaaacagtaccatatattggacactgatgcagagcatacatccctgccaccatggccttctggagaactttgccccagccctgcaaagtactgtcacctagttggcattgtaattgtgacttcgaaaggccagtccaccgttctataaatccagctgcttaaggatgatggggaacatggtaagaccagtgaattccatgagcatgagcccactgccacactactttagctgtaaagcaagtgccttggtcagaggcaattgtgtgtggaatatcataatggtggataaggcattcagtgagtccacggaaggtagtcttggcagaagcattgtgtgcaggataggcaaacacgtatctggagtaagtgtctattccagttaggacaaacctctgccttttccatgatggaagaggtccaatataatcaacctgccaccaggtagctggctgatcaccccaaggaatggtgccatatcgagggctcagtgttggtctctgctgctgtcaagttgggcactcagcagtggccatagccatgtcagccttggtgagtggaattccatgttgctgagcccatgtgtaacctccatccctgccaccatggccattttgttcatgggcccattgagcaatgacaggggtggctggggaaagaggctgagttgtgtccacagaatagatcattattaaaatcctcctctgctgaagtcactccatgtgaacactcacacgggatacaaatatcttcacattttttgacccctcagataggtccatccacatacctcttccttaaatttctttgtcaccaattttccagtcgtgcttcttccaagtccctgaccatccagccaaaccattggctacagcccatgaatcagtatataatctcacatcggaccgtttctccttccatgcaaagtgcacaaccacgtgcactgctcaaagttctgcccactgcgaagatttcccttcactgctgtccttcagggatgtcctagaaagggccatagtgctgcagctgtccacttttgggtggtgcctgcataaccatgcagaaccatctgtgaaccaggccttagtcttctcgtctctgtcaactgatcatagggaactccccatgaggccatctgctgggctgagggagagaaggcagggtggcaagaatggagaccatgggcatttgagccacttcctcatgtaactaacttgtgccttcaggacctgctcaagcccgatcacgtatacaccacttccatttgatgatgggatgttgctgtgcaaaacccgctttttggctggatgggccagaaaacactcagttcatgataggcaattcagtttgcatggtgacttgatgacccatagccaaatgatcagtttccaccaaagcccagtaacagcaaaaggagggtaattatctgcagatggcagggccttgctccaaaatcctagaggcctctgcggtgattcaccttttgggcttgccaaaggctccaaatagcatccctatctgccactgacacctcaagcaccattggatctgctgggtcatatggcccaagtggcagagcagcttgcacagcagcctgagcctgttgcagagccttctcctgttctggaccccactcaaaactggcagcctttcgggtcacttgataaatgggccagagtgacacactcaaatgaggaatgtgttgcctccaaaatctaaataggcccagtaggtgttgcttctctttcttcattgtaggagggcccaaatgcagcaactcatccttcaccttagaaggaatatctcaacaggcccctcaccactggacccctagaaattttactgaggtagaagttccctgaattttagttggatttatttccgatcctctggcatgcaaatgtctcaccaataagtccagtgtgtttgctacttcttgctcactggatccaatcagcatgatgtcattaatgtaatggaccagtgtgatatcttgtgggagtgaaaagcaatcaaggtctctctgaataagattatgacacaaagctagagagttgatatgcccctgaggcaggacagtaaaggtatattcctggccttgccagctgaaggcaaattgcttctagtgggccttatggacaggaatggagaaaaaggcatttgccgaatcaatggctacataccaggtatgaggagatgtgttaatttgctcaagcaatgaaaccacatctggtacagcagctgcaattggagtccccattttgttaagtttatgataatccactgtcattctccaagatccatctgtcttctgtccaggcgaaatgggagagttgaacagggatgtggtaggactcaccacctctgcatctttcaagtccttgatggtggcactaatctctgcaatccctacagggatgcgatattgtttttgatttactatatttctaggtagagccatctctaatggcttccatttggcctttcccaccataatagccctcaccctaccagtcagggagccaatgtaggggttctgccagttactaagtatgtctatgccagttatgcattctggcactggggaaatgtctacaggatgagtctggggacccaccagacccactgtaagtcagacctgagctaaaactccattaattacctgacctccataagcccctactttaatgggaggacctcaacgacattttaggtaccctggaatcaatgtcagctcagagccagtgtccagtatccccaaaatgtctgatcatttccctttccccagtgcacaggtaccctggtaaaaggctggcgatctcctggggaaaggatgggaaaaagagtcactgcataaattgtcagtaatgtagtggggtccttcctcaaggggatccaggctccccttcattcaaggcgttctgggtctgtaaactggctcaagtctggaaatttattgaggggacaggattctctgtttttacaattcaaattagtcttttgtccatttgacttcgaagttttctgcttgtataaattaagtagaaatgcagtaggcttcttatcaatttcacttctaggaacaccatgattaattagccaatgccagagctctacatgagtcaggctattctgattgctgctttgcctctgctgtccattaaggtagctatgcccaccttgcctttgacagttgagtgccatcacttggcccctgccacctcaggatccagttattcccactgtatttacattttgtagttgagtgacttggttcccactgttagatctgacatacagagaagaccaattataggactcttcaaaaacataagtgctgccctcataaatctatttcacaaggcattgatcaagggtatgtcttctggaacctcccagctgggatgagtatgtctaaagtgactaatccactccaccatcccaatctccctaagcctttgggtcccttcctctacattaaaccaggggagaccaggcatttccagctcactcacagtgagtcatcttttaattcatatttcatctaaccaagcaaataaactattagaacctttttttaactccctgagctgcagtattaaaagcagagtgggcccaaatcaataaattcagcctgatccaactctatgttccttccaccattgtcccatacccttaatatgcattcttatgcctgttctccagaatgctgtttatataaattagagaattcaaacagttattttcaagtgtagcacacctcctattgggtcacactctcaacctcatctctaggggtccactgggactttagtctagttacaggtctagaagcaaacaggggtgttggggtggctcctgaggagaatcaacattatttggcctggtgagtgcctcagggaggccatcactgttgcctcaggcagcacagggtttatgtcctcagacagatgtggaaaggctatggcagtgtgggtcagggaggagatgttgccactactggggatggggaagctgttccttctggcaaaaaaggtccatcagagtttacaaactcagtatccccagcttcattagggtcctccacacatcccattccaagttgcagggtcccattcttttccaatcaatgcctttaacagtagacactgggtgaggctgtgcatgcaccttttgttgcaagtcagccacttgcacgataagaacttgtgtctgttttccacaatttcagctctttctctacgggagataagactctcactcagggcagtcttatcagatttaaggctcagtatctgcttctgaagccaggagacagaatccctgagttcatcattttctttcatcactttgtccactgaacttaggaccaaccagcttcattatgttctttggttctccacatatggtcaaaggtattaggtatagtcactaaactccttgcctcttaggagcggtgaatcaggagtgtcaaatgcatttattttgcataactctctaaacagtttatgccaaggactatcagtgttttccatagtattagaactagagttcttggcattttggggtctaatcatattaagcagccaacttccccaaaaccaacaaaagaactccatccttaatattcagttcctctagaaccattcctgctacaaaaatctgtattagtcagcattctctagagagatagaactaataggacatatacacataatacttaatagtttattaagtattaacttacacaatcacaggttccacaataggctgtccacaagcttgaggaacaaaaagagccagtccgagtctcaaaattgaagaacttggagtccagtgttcgagggcaggaagcatccagcatggaagaaagatgtaggctaagaggctaggccggtcttgccagctttgctggaagctgattagattgtgcccatcagattaagggtggatctgccttccccagctcactgactcaaatgttaatcccttttggcacacacacacccaggattaatactttgtatcccccaatccaatcaagttgacacttagcattaactatcacactcatgctatggtgaatgtggatataattgtgttgaccacaagacagaatatttgcagtcaggtctgtcttagaaacatgatacctattataaaagagaatttccgtaacctgtagggtgaagtgtcagtacaatttctgctttgcaaatactaggattatggaagattaaatgtgtgaaaggactttgaaaaattaaaacatatcattaatcaacaagtcattccttaaaacctcttattcacctactatatactctttggacagctgtgtagggtcttaagtatagaatgacaaggagtgattatctcttaaataatattgtcatccgtatcccagaacttgatccaacggaagaactctcatgggagtcagtgaatttatgatcaaatgattggtaaaacttttggggggaggtatgtgcatttatgagatgtgttcaaattcttctccataagctccgagtcttaaacacttagtctgggcctgggacaaataaatatatttattgcctgttctattcaatatgtctttctaaataaaaaatcacaggaatgcatagtctcagcatagacagcccatctgcagtgaaaccttccctgacttatagcccaggtttgatctgagctgtatgttttgtcttcatagctgagatcccatgacaatacttattccactttattgttatttcttgtctaaaattgtctgccttccctactagacaaccagctcttggaaaccaggcatttttttttctctctttttctgtcattgtagtcccagcctttaacataatgcctggcatataatgagtcttcaataagtacttgttgaatgaatgagaatatctacataaagattttgtgtttcttctaaaataagcctacctcaagagtttctaaccatttggagttactgaaaaggaatagctgcaagtcataaatatcaattcctcctgccacaatttgtaggcctgtaactaattcatttctatcttcttgtactaatcagatctcttaaagcatactcaggatttcagagctagaaggaaaacttaagaattatcaaaaggaattccagagtggttgtgtgatttgcccaaggccatgggttagtggcagagctggggcaaaatgtcagtctctgatgtgaacatcattaccataagagaaattcagtgccaacatcttctaagcagtgactcaacattatttggacagaatttattaaaatgaagagcctaggcctacccagttattgaaaaggaataaatatttaaacatcttattattctgagatgaatatgagaatatgcctctggatagttaaaaagagtcttccaccaaccaccaactttgcaaatgggtgtttcagagaccacacataatgcatggtactaattaattgaaacaattttcaaaccagagtagatttttgcctttaaaacataaaccaagccaaaaggagtgtcatgcttaattatctgcataaaattttctgaccagagcactcatttagctgaattaccttctccacagtggagaagaaaacatcatcaggagacttagttaaccaagtgtttgaagaactaccattctgcaaatatcattgactccccccaaattctgagatgtaatacttactctaggatggaattactttaggcaaataagaaagcattttacctatcatagggaaaattaaccctgatcattgctacagctcttgaaaaggaaacttttttagtatattcactcttaatggctaaggaggtgtctgtagagttcctgggaaactgcacagagtctgagtattctctggcagactgaaatgcagtgccaaataattttttaataagaaagcatattctggaaattaattgcacatatgagacatctccattgactgaactgcaaacatgattgcatttccaacttacagatcttttcatgttccttgcgtgtttcctatggcttcccattgcctacaggatcaagttcagaccctcaggaaggcttgcaaggcccaacaggatcttgctggcctaattctccaaccctacccccaccactgccctcagcctaggcactacgcacccagggataccgctgccctcagcctaggcaccacgcacccaggcaccgcacataccttgctgttttgttcttgtctgctttaccttcagcacctcctttctaaagttttcccagatacaacatctatgcagagtatacccaacgttctcttatgtcagccacacatcattcagtcaatcacatattgactgagtagctaccgtgtggtaggcacaagggaggaaacaagataaaggaccttgtccctacccacaggaaaatcagtggaggaaataaatgttataattactataccttggtaagtgctaaaatattctctgtatcttacacatgcttctgatcacacaatattgcaatcatttttccacatgcaagtctccctgactaggttttacctttttgaggctaagaacataacttatcttggtatccacagaattgaaaactgtatctcagacatatgaaagctaaataaatatttgttgaatgttgggtaggcaaagttctattttaattgtatgtagtatgaagaaatttgaccaagtctggctaatagactattaattataggaatggacagaaatgataagtaagggcagaagggcttcaggtatctgacatacacatctttaatttctgtttcccctttgaatacagagcaacatctcctgacctttccagaacagctgaccagatgtggagatgcaatgatgcccatatttgaaaacagtatagtaccatgacaggcaggcaggcccaggctatttatttgttgtgagctctttggcatgtcataacttctaggcttgatccagtttatagaagagaaagttaaactatattcattcattccctcatttattaaataatattgtgtttctaccatatgcctagcattgtgttcaggacccaggaagcaaggaacaatgaatgagatgtgatcctcaactccatgaaacttatatctgttgggagagggagaaacacacataaaatttcagtgcagatttggagaagtattatgggctgtggagattggattttatcctgaaagcattgaggaagtctttaaaaggtaaattagaggaataactccatcagatatgtgtgccagtggatcaccctggcttcagtgtggcatgggttaaagtagccataggttgtaggaagagggaccaattagcagactgttgcttggtttgagtaagtggcacagccagaggatgatgaagagacctcaggtttctgcctgccttaagtttctatgattggccaccctcctgtgtctgtgcagacagtctgaatgcagattctccaacagaaggtttgtggttcaagattgcctcacaattgctggtaaagagagctgaggatgatcccagatggcacttcaactttctctaattttgaaccttgctgtgcacctgaataccacatactgacttgagcaaaacagtagtgttattgttagggctgaagcaagctgtttgtcgagactccataatgcatattggtgacaacaggaattaaactctccacctgcaggacagccagccagtggggtgtagaataagtgtgctggcagagactttagtatgtaaaagtgccgcaggaaaagggggcaagctttattctagaagagtcccattcaaaccatagcagataaagatattataattagaaccagaaccaagaataaatactagagtaagaaatgacaccagtttgcttcttcccagtatcagagagtgtctctttctggctatatggacatgaaattttgactgggttccagaaaggcaagaaagggtggtttgtcatgggcttttcaatgcctacgaaggactcaaagttatttgagatattacatttgaatatgatttgatgtgctgtttgataaaagaacatcaatgggcaaaagaatcacttagtcaaaaataagttcttctgactaggacttatgacaactagggaagagtagtaaccaggcttttttctggaataagaactatggtgtccctctatgatgagcaagatcaggtcctccaaggagttatacatcgcaatactgactggtctgacaagtaaaagaccattcttagtacccccacagagcatgctgatggtatctcaatctttagaaggtttaaaggatgggatggcgccagaccttactttatatctctttcagggttttgtgccaacctatgaacaccaaaactcagcactattttatgcaaactatgcctgtagaccatatttaagagtatggaatgacttctctctggaaagagtttcctcgcctcatccccagtataacatgtcgaaaagaaataaggaagaagaaatccaggatgctagttttgaaaatgaaattttgttcccttcccaattttaaatgcaggtatactcattgtcttctcgaaatgacaaaaggaaaaaaaaaagaggaaagttacaattattcataaatctaccaataaaatgtaattactgttggtacatgaatgtattttcatacaatcaacacgtgtatacacgacatttaaatgtacttccttctagttttttattcatctatgttggatatgtggggtttatgtgtacattgatttagcagtgcacgtgatcagtggtttaaaggaggggatggctttgctgttagatcccagttataaagacttatcttgtttaatagtttgaaaccaaaatctatttcaattagagttggaataattaggaaatagtcttgatacttacgctaaattatccatttactaatccagaagatatattcatccctctagtagcttaaaaacccctttctttccctgctgtttacaacccttagcacttttcaattgtggcatgcttccatctctttcatcccccacctatatgctcagacacagaatgtgttcaggcaatttttaagttttgtaaatcattcccaatagtcccttaatccttcttgccacttttctctaaatccctttcagtcgatcagtagctacttggagggtatggcctgcgataacctgacacaggcttccaggacactgttagaggtgatcgccatcttcatgggcagtggggcagtcctttgtacatatgcagcctcacgtttgcctttattttcccggcttctgctccgtgatgcaatttcctgtccataaatggtgcagatctaattccctgaccaccatatagtaaaggtttactttgacatattgtccttcctaaaaagaaattttactgcacagttataattatcacatttttcttaattagcaacctcttctgatttctttttcatcttctagttttataaaacattttctttatcttattttaacccaacttactgaattctatgactattttcttagttccttttttttgtacttgataagatctctgagctactctttactgcttagatttttcaagtatatggtattatatcttgattttggtgtaatctcagaactccagctattcttccagtctatgggtagaataattatgtcattagagacattggagcctgcctctcccatgacggccagctggcaggggatatatattatatgtcttggttgatggctttcaagtaaaagggtgaatctgcgaagaccagtactccttgccaacaagctctttataaaatcaactatttcattttgccgcctgagctctcctttggccgttagattgaacaatcactggatgtttcctaaatttgtcatcaccccaaacggagactctgtaatattaagtaataactccttattctcctcttctaccagtccctggtaacttcaattctactttctgtctctatgaatttggctgttctagctatttcctataagtggaatcattcaatatttgtcatcttgtgtctgactaattttatttagcataatgttttttaaggttcatctgtgttgtagcatgtatcagaactttgttcctctttaacactgaataatattccattgtatggctataccgtactttgtttttccattcattagatgatggacactagggttattttcaccttttgcctattaaaaataatgctgcgatgaacactggtgttcccattcattttgtaaagtaaccccctcttttttcttccttctcagccacatggcagcacttgagtctccaactctcatatccatggaggccgtgctacttccagccgttcccacctccacacacaaaagtaaaatagaaatttctttataagggagaaaagaagctattaattgccctaattgtatttctttgtttaaaaattatatatgtttttgaaaaatatagaaaaaataagagaggggaagtgttcccatactcctaccactttggtgtaagtaatgatataattttggtttatttctgtcagtttttttgcattgcattctttttcagacctaaatgtgagcatgttatggttcagaagtctaagtctgtttttgtttttgttttgctgaaattaaaatagccattaagatttcctttggtcagtgtttgccttttatatcttttttcatcctataattttcagtctttctgtgtacttatatttcatatatgtccaagtctgctcctaatatttgcagagcctgaggcaagagtacaaatagaggcccacatgcattctaattgctttattcagtaattatatcttcatttaggaaagattttcaaattacaaaggcctcatctgaccgattccagttacaaattagatcagaataattctcttgctcatttttattattttggctagtaattaaatcctcattaaatataaaatgtgttgtttgaaaattttttatgatgaatgcttgacagagatttacccactttcattatttctagtttttaaaaatgtcagtagactgcttatttgtgtattttatttttttggcttttttcctcctaagattttttttcataggttctcttttatcataatctcaaattcttctcattctatttcccctcccaccatacacactgtgaagcagtgactagctccttcttagctgcggtaaaacctgcaaatctttacggcatttgaacacagtgaccatttgtttcaaggatttagggcaaggaaatgtggagaagtactttttctggaatgtgaatggtattagacacaaccgtggatgtttaggattatagatcatgctgtgacagaatgacaaaggtgtcaatgtggtctttaatataatttgtgtgttggtggtatgatgtgccatttaaagcagcgcttctcaaacattaatggtacatatgcatcacccggagaagcttcttaaaatgcagattctgaatctttagatctcggatggggcctaacagtcagcatttctaacaggtgcctgagtgatgctgttgctgttggtccgagatccatctcttgagttgtaagactctgaagcataggaccaagatcaggggtctctctcatctgatattaagagtagtactctgtatgtcctatatgaatacactatagctggaattgatttttaatttgaaattataatcatcgccttttaagagtcatgtttagtttatttacatttattgtaattttctaagttattgatatattgggattttttccctattatttaaacactggctttgcattttatgcattctgtgctttgggcttttttttaaaactctccttttcccctggaccattttttccccttcttcttattccatttttagcctgtattagtttaaaaattaaatgcttgatttctattctttcaatgtcattcttaaaattttaacatgtatattaccaaagtcctaaatgaattaatttatttttaaatggcaaataaaaatcgtatatatttattgtgtacagcatgatgttttggtatatgcatacattatggaatggctaaatcaaggttaattaacatatgtattgcctcacatacttatctttttttgtggtgagagcacttaaaatctactctgttagcaatttttaaaatacaaaatattgtgattaactataatcactgtgatgtacaataggtctcttgaatttattcctcctgtctaattgaaattttgtatcccttgaccaacatcttcccagtcacacccccatccctctggtaaccatcattctactctagttgtatgagttcaatttttttagattccatttataagtgatttaattaatatctttatcctctttccagataattcaaggaccttagcattttaactctagtcaactgtaatattacattccatcgtattgcagtattttagtcttcttctattaagccttccaaattggatattagcattattgtggttgtttcacattagcattattgtggttgtttcagatagtcaatattgatgcagatttacctgaatattacccatgattaccatcattccttctttctacttagatttccatcatccttcttcttgaaatataatttttaaaaggtccattgaagaagttctgttgatggtaaatacagttttactttctttgaaaatatctttattttgcccacatcagttattttattgttcagtattaagaaaacctaattcctgtgttttcttcccatcattgttgatattgagttgtgtgccatcaggcaaatgtcattactttttagatattctaaactgttgtttctttaagtaagtacattgtctccccttaatctgttctcttcgtaatgttttatttatttgtctcactataatgaattctggacagtttcttctggtctttctttcagtttgctaattctctattcagctgtatctaatctgctatttaattcatccatcaagtattttttccttagtattttgttttaataattttatttactatttctagatttttttctaatcatcctggtctttgtcatagtatcttcttctttatatacattttatttatgtatctgataacattaataacttaaacctttgtaagttataagtatgtttttagtttttgtgctgattttgttcaaataaacatattttgtatgtgtgttgtttgtgttcttgcagatgtgtatgtttatcatcactctacactcatctggactatatctttgggaattcttcatgtcctatattgaaaatccacttcttcaaagaaagattacatttgcttttgccaagcccctagaagccctacaaactagaactaaagctttactaaaataagcctagaccttctgcacacatgccaatagtatgaatgcaaatcacaaatctacatcatttttatgaattctaaacttttatgaagcagagaattttttttattcttcttcacccagaaccaaggacaaaacagacaagttttcttttacgttccctatgcttgctggattttctctttctagtttactcattccttagggtcatggtttttcaggtcttccctcattgcttagggtcaagactgtgccccttgtccctccacatggttgttgaaatgcaaagctttaggttaaaggatcagcagttacccttagagcagccactgtctgcaatgcccattcattatgctagatttttacttcagtttttttttttttgagctctgtggagttcttttacttaactgttaacttgcttaataaaaacagatttaagaaacattttgaatgtttaaataccagcttttcttggtattctataatgtgagtgcttgtatcaattacaaattttaaaatattatttgtaaattaagtggttactatggttaatttagaaatgcagaaaaatagaagaataaaaaattttagaattttgtaaactagagatagcataaccattataaacatgttagaatttaagatttttttcatatacatttttacataaatgagattacactacatttatcgatttgagcataagatattctcaagtgagaaagtgaatgattatattgagaggttggcagcaaataacatcaagtctttccaaatgaaaacctcaattctcatatcattaaatataaatttttcaatgtagtaattattcatcatgtatatttttaacaataaaacttctatttgtggaagtacaagtttgtgtaggggacacatgttttcacttctcttgggtatatacctaggagtagaattgctgtatcatatggtaacctgagtcttagccttttaaggaacagcaaaatggttttccaaaaggctgtaccattttacagtcccaccagtaagaagaggagagtaggacacagagaccacgtgaagacactttgccaacacatgttatcatctctctttttaaatcttagccatcctatcaggtataaagtagtatctccttgtagtttgaatttgcatttatttaatgaagcatgatgttaaacatgtttttatgtgcttattgtctatttgtatatctttcctggattatgtctattcagattcttggcccatttttattggattgtttttatttttgagttgtgtttttaatatattctggatacaagttcatataaaatacatgatttgcaaattattttctcccattctgtgggctgtcttttcactttattgatggtgttctttgaagcacagaagtttttaattttgatgatgctaatttatctatttttgtctcacttatacttttggtgtcttatctaagaaactgtcatctaatccaagatcatgaagaattattcctatgttttcttctaagagttttgtagttttcgcttttacatttaggtctatgactcagtttgaattaattgtatacatgatgtgacagagaggtccagcttcatctctggcatgtagatatccagttgtccaagcataatttgttgaaaaaactctgctttcccctattcaattgtcttggcatttttataaaaaataaaccgcatatctatgtattttaaattcagttatatatactgtcactagccataccaggcatcatatgtacttacaagcttaagactagcatggaaatgattatcacgggccatggcaaagaataatgatctgctatttccaaagattctgtgaagatgactgtgcagccgagaatttatttggtttatagagactaaaattccgtctgctttgttcactattgagttagtagctaaacagttgtaaaatttctcaagtctctcagagctcacacttgcaggaagcttgatttcacaacttgtacatgacagtctcacataaaagtactctcgtgagagtgttactatggacagaaaaaaagactatacctcttttatgactgctgttgttatttagggcttcttttttcttgatgttgtttcaaaaggttgcattttgcaataagcagcaacaccttaagatagatcttaaacagaaccatgtttaaggcttttttttctcccctttagtcacagtgattttccatttgccctggaaggcattcagcattacttgtaaacagcaaagataaatgtggcttctgatattcatctttatgaatagtccatatgtttataaataggaatagaacaaaaagcactgtcccaaactttcctttaaattctaaacatctaaatgtattttaaatattccaccccaattaatctcacttttaaataaaacattgcatgtctaaggtggaaaaacaaaagactcttcgacaatgccacacaactgcatatgtttgaaaatagggtggtcacttttaattgatatagaggaaatttgggaaagaagaaaagtaatcaactttcctatatctggagtcctttaaccaataaacagacaaaccaacataaagcacacatggtaagctcagcacacataactgaatttctctttttacgtttttgcacctcagcctgtccaattgtgcaaagaaggggaggaggattaaatatgcaactgagtagccagggcctctagctgctggtagttcctcaaagctgtacatccctccctcaccataacttgtttgttctctccagcaaataccatttactagggtgcccagattcacctctgtaggcccaagactgtgaggttcctagacaacaggattttgctctgaatatcatccatatatgcactctttaatttaaccccgtcttggcaggcataaggagtagcacaatgaaaaaatgtagatcctgcccccaacaactgtgtaagcttaggagaccagcactcagaagaaattttagcatagagtaagtgcacagtaaaagtttgttaataaggaaggaaagaaagaggaagggtgtgcaggagggaggaaggacaaatttggatttcatatgtcataccagagaaagatggaagcagcatattgagatatagaagtggtgtaaaagacaagaagaaatcagtttaagaaggcataggaaccagaagtggaaaattagggtataaaacttaagtgtctttggagacaaactggatttgaatcttagatttgccatttgctggcagtgattttgggcaatttacttaattatatttgatcttcaatccgctgtataatgtgtaaggagtaactatccacgtcattggaattattaggaggatttaataagataataagttttaccaatttagcacaattcccagcacataggaaggactcaggaaatattagccatcaatagaagacactatctattcatttatttacttttatttacttatttatttatttttgagacagaggctcactccgtcacccaggctagattgcagtggcgcgatctcggctcactgcaacctctgcctcccgggttcaagcgattctcctgcctcagcctcctgagtagctgggactacaggtgcgtgccaccaaatccggctaatttttgcattttttgtagagacagggtttcaccatattggtcaggctggtcttgaactcctgacctcgtgatccacccaccttggcctcccaaagtgctggtattacaggaatgagccaccgcgcccagcctagaagagacgctcttgatattcaggttttctttaaccctgagatgtggccatggcacacaaatgtaaacattttcaaatcagtcccaggtggtaggcttctagatttttgttttttacctttgaaatcggttcaagacaatgccattatggaaagcctctgcagaagaaactatttttattgtaccaattgcctttctaaaatctgtcaaatcttttaagtttctcccttgacctttttggaagcttaaacaggaactgaatcatcataaaatttttgaaatttgccttgaatctactttggagctgcatgaattgagatctcttggtaactgaccttgtgttgacccagataggcctgttgcagtgtacggcatgtacaccgcacacctgccaccacccctgtggcagcaatgtttgcgagcctgaagagttttgtgtggggagttatgacagaagtcagccaagtgtaggtaatgatgtcaggtagcatgggaggttggagcgcaggaagaggcaggggggggatctttaagcaaggaacccttgtatccagctgtgccaaatgggccttccctgaggacttgataggcaccctattgccacttgtaactcagcaattgaggtcacagtcaaagaaaaaaacctttatttttcacaatgtcatctttcagcagtacagcttcataagtgaagatggtgatgttccaacagttcatctaaactctttaaaatcctaccaaatacgttgcaggtggtgggtatgtagtaaaagtggataggaggagggtaagtattgaaatctgtttgagatatgaaattacatgagtaaggtttggggttttcaccacaatttcactcgcgtccatgtgaagagaccaccaaacaggtttgtgtgagcaataaagctgtttatttcacctgggtgcaggtgggctgagtccgaaaacagtcagtgaagggagataaggatggggccattttataggatttgggtagataaaggaaaattatagtcaaaggggggttattctctggcgggcagagtgggggtcacaaggtgctcagtaggggagcttttgagccaggatgagccaggagaaggaatttcacaagacagtgtcatcagttaaggcaggaacaggccattttcacttcttttgtggtggaatgtcatcagttaaggcaggaaccggccatctggatgtgtacgtgcaggtcacaagggatatgatggcttagcttgggctcagaggcctgacattcctgtcttcttatattaataagaaaaataaaatgaaatagtggtaaagtgttggggtggtgaaaattttgggggggtgatatggagagagaatgggcgatgtttctcagggctgcttcaagtgggattaggggcggcgtgggaacctagagtgggagagattaagctgaaggaagattttgtggtaaggggtgatattgtggggttgttagaagaaatatttgttgtgtagaattattggtgatggcctggatatggttttgtatgaattgaaaaactaaatggaataacagaaggagaaaaacaggtataaaaggtctaagaattgggaggacccaggacatcagattagagagtgcctaaggagattcagcatagtcctgccagcaaagattatttatttacttcaagagttaagagtggcagtttggggatagcaccaggagatatcagctgtgatggcttggagaaacagtgtaaactggcagtgtaaacaagagcagggcatgtatgagtagttgagaacggtgaataggagtatgactagacagaagatagtagggatgacaagttttttgggggcacagtctaagttggtctggcgtctggaatgagactggggcctaataaaaaggaccgtctgtacaggagctcaaatgggctgtacgctgtagcattctgaggacaggtctgacttctgagaagggaaagtggtaaaagtatcatccagtcctttttaagttggtggctgagcttggtgtggtgtgtttttaaaagacctttagtccgttctacttttcctgaaggcagaggactgtaagggatataaagctttcactgaatactaagagcctgaaaaactgcttggctgatttgactaataaaggctgatctgttatcagactgtatagacatgggaaggctaaactgaggaattgtgtctgacagaagggaagaaatgactatggtggccttctcagaccctgtaggaaaggcctctacctatccagtgaaattgtctacctagactaagcggtattttagttatctgacatggggaatgttgagtaaagctaatttgccagtcctgggttggggtaaatcctcgagcttgatgtgtagggaagggaggaggcctgaataatccctgaggagtagtagaatagcagatggaacactgagaagttatttccttgaggatagatttccacgatggaaagaatatgagaggttctaagaggcgggctagtggcttgtactatagcatagcctgcctttggtggtgtgtggcgattaggcctggtggaactgccatcaataaatcaagcgtgatcagggtgaggaacaggaaagaaggaaacatggggaaatgaggtggatcagagagatacagtcatgggggtcaggtgtggtatcaggaataatgtgggaggccagattgaagtccgggccaggaacaatggtaattgtcggacttaaagagtgagtacagctgaaggagccgggagcagaaagtatatgcatcaggtatgaggaagaaaatagattttggaagttatgagaaatgtagagagtgtgttgagcatagtttgtgatttttagggcctctaaaagtattaaagcagtggcagccactgcatgcagacatgagggctaggctaaaacagtaaggtcaagttgtttggacagaaaggctacagggtgcagtcctggctcttgtataagaattctgaccgcactaaccatgcctaggaaggaaaggagttgttgttttgtaagggattgaggtttagggattaatcagacacgatcagtagggagagcacatgtgtttttatgagaattatgccgagataggtaacagatgaggaagaaatttgggcttgactgaagtaatgggggctgcctgtgaagctttgcggcagtacagcctaggtaatttgctgagcttgatgggtgtcagggtcagtccaggtgaaagcaaagaaaggctgggatgaagggtgcaaaggaatagtaaagaaagcaggtttgagatctggaacagaataatggattgtggagggaggtattgaggataggagagtatatgggtttagcaccatggggtggataggcaaaacaatttggttgataagtcatagatcctgaactaacttgtaaggcttgtctggttttagacagataaaatgggggaattgtaaggagagtttataggctttaaaaggccatgctgtagcaggtgagtgataacaggctttaaccctttcaaagcatgctgtgggatgggatattggcattaatcggggtaaaggtggttaggttttaatgagatggtaaggagtgtgtgatcagtcgccaaggagggagtagaggtatcttatacttgtgggttaaggtggggggatacaagaggaggactcaaaggaggctttggattgggaagaagggcggcagtaagatgtagctgtaatccaggaatagtcagggaagcagataatttagttaaagtgtctctgcctaataagggaactgggcaggtggggataactaaaaaggagtgcttaaaagagtattgtctaagttggcaccagagttgggaagttttaagaggtttagaagcctggccgtcaatacccacaacagttatagaggcaagggaaacaggcctttgaaaagaaggtaatgtggagtgggtagcctccatattgattaagaagaggacggacttactttccactgtgagagttactcaaagctcggcgtccatgatggtctacggggcttccgaggcaatcggacagagtcagtcttcagccgctaagctaagaagatctgggaaggagtcagtcagagagccttgggccagagttccaggggctctgggagtggctgccaggtgagttgaacagtctgattttcagtggggtctcacacagatgggatacggcttaggaggaatcctgggctgtgggtgttcctcggcccagtggccagatttccagcacttgtagcaagctcctgggggaggaggttctggaggaacccctggcagctgcggttcaggcctttggagttcttgtgtgctggagatgtggctggggtttgtctcacagtggaggcaaggaattgcaactcagaaatacattgctacttggctgcctctactctattattgtacaccttgaagttgaggttaattaagtcctgttgtggggtttgagggccagaatttaatttttggagttttatttaatgtcaggagcagattgggtaataaaacgtatattgagaataagatggccttttgaccttttagggtctagggctgtaaagagtctcagggttgctgccgaacgagccatgaactgggctgggtttttcatatttgatgaaacagcctaaacgctactgatttgggagaggtcagataaagaaaaaggagcattaaccttgactatgcctttagcttcagccacctttttaagaggaaattgctgggcaggttggggagggctagtcacggaatgaaactgtaaaccggactgggtgtgaggaggggagttgataaaaagattataggttggaggagcggagcctgaggaagaattcggacctagctcggcctggcgaggaagggagaggtcagatgggtctgtagaaaaggtagattagaaagactcagtgacacttggggttgggactgaggggacaggtgggagggaaacaaggaagatttgggatgagttgcattgggaacagagactagggagggactgatgtgtaaaagaatgcctggacatcaggcacctcagaccgtttgcctattttatgacaaaaattatttagaacttgtagggtggaaaaattgaaagtgccattttctggctatttggaactactgtcgagtttgtattggggtcaagcggcattgcagaagaaaataagatggttaaattttaggtcaggtgagagttgaagaggttttaagttcttaagaacacaggctaagggagaagaaggaggaatggaaggtgaaagcttgcccatagtgaaggaggcaagcccagagaaaagacagtagagacacagagaaggggtgggggtttcttgccctccagaaaagcagagaaggggtcggggtgtggaaataaggggttggggcacagagataagaggtcagggcatggaaataagggatcggggcacagagataagaggtcggggcacagaaataacggatgggggcacagagacaagaggttggggttcctgcccctcccccagaaaagcgggacttgccgctaagggtgaaggaccaaggcaggcgtccctgcgtggtctgacaccactgaaacctgggtgaataatcagagaggcatccttgcaatgattaaacaccaagggacggctgccttccctagtccgtgactggtgccggagttttgggtccacagataaaagtgtctcctttgtctctaccagaaaatgaaaggaattgaaattaagagaagggagagattgaagtgtggcgccaagattgaaagaagaaagacgttgagggatagtgagagaggttggagaagagagtaaaaaaggctgcttattggatttaaaattggtgagatgttccttgggctggttggtcggaggaccagaggttgtaggtggatctttctcatggagcaaaatgcaggaggacaggggattgatctcccaagggaggtcccccgatccaagtcacggcaccaaatttcactcgtgtctgtgtgaagagaccaccaaacaggctttgtgtgagcaatacagctgtttatttcacctgggtgcaggtgggctgagtctgaaaagagagtcagcgaagggagataagggtggggctgttttataggatttgggtagataaaggaaaattacagtcaaaggggggttgttctctggtgggcagagtggaggtcacaaggtgctcagtaggggagattttgagccaggatgagccaggagaaggaatttcacaagacaatgtcatcagttaaggcaggaacaggccattttcacttcttttgtggtggaatgtcatcagttaaggcaggaatcggccatctggatgtgtacgtgcaggtcacaggggatatgatggcttagattgggctcagaggcctgacattatcattcataataaccagaactttatattcttaactacaattattaaagattttataggttacaatacactgggatatacctttctcaaagaaacatttaatgttatcccagaattaaaatatacttttgcaaaataaaatgtttatcaagtctgccaaaaagagagccaattattttggtttctctctaggattttaataaattcctttgatacctagtcaaagcagttgagcatcctcacattgaacaaaatgaaagcaaggaagcgatcaatctcatttgaaaagtgaacaaacataaaaatcattatcttttaaaatttttcatttttacatgttgcaaagaagaataacctttcttatgtttcttgcatgtttcttatttcctcagtaattaaaaaatcatatttagatacatttattactagtgaatgctttttcatagttttaatcacattgatttgttgagaattatcagaaaacataattattcagataaggaattgtgaacagtcttatggattaatacgttctcagaacatcagtgttttagcaaataagatattatttacagtgagcacattgttagcctcactagatgtcagtgtagttctaagtaaatattttatatagttcctcagtagtgttgaatgagaagatgttttgctttagaacttaaagattgagaagatggaatagttgcaataagtgtttgtggtacattaattccaacatcctcctctgatgaaaacacataattggtaaatttatacacatcaacacagggccaaaaaatagtccaaggatgtaaataattatggattcataggatacattgtgcttccttagtcaccaatgtattttccgtacattgaaaagtcttactgtacatcacaacatgctggtcagccttttagggcttttcccaattgcaaagggagcatggttactcctcctgccatgagagggcagcactgagattgtctccagcccaggaagcagtgggcactgtttagtatgggttagcacctaggtttttatgtggaagcattcaagtcaggctgtggtgatatatgttctcagagtctaccatagtatcattttagtgcttttattacaagtcatcaaacactgtatctgagaaacatgaggataaattatggtacattcaaaaactgctgataaatagcaaagaagagaacagggtactttgggaatataaggccttttgcgtgagaaatgttttgtgctagctatgagtgaattttctacaagcagagaagttccatttggtcctctgaactggttaacattttcttgattctttgcttagtgtagcaaataaaattctgtttattctttttgagagttcccaaaatatctttattgatttggattttgctttttcactttattttatagttgattttaagtttttcttgagtgtgttcatcagatagccatataaaatggaacaatgcatttgtaataacaaatattatacatgatatttttttggccagcccagttgcacagtcaactgagaaagtggaagttatcactttcctcttaattccttttacatatttttcctctggatgagaaaatgttactttctcatatccagaaaagtgttataaaatgatacattgagatcatctgattccctctttattgtgattgtttctttaaaagaaaaaaaagcagaaaggggccatgaacttacaaagaaagttttaaagaatacaccaaaaattgttaaaacaataaatgagttcatcaaggctgcagggcacaagatcaatacacaaaaattaattatatttttatatacttgaaataaatgatctgaaaatgaaggaaacaattctgtttacaatagcatctaaaagaataaaatatttaagaataactataacaaaagaagtgtaaaactaatactctgagaactataaaacattactgaaataaattacagaagatctacataagtagaaaaacagcccatgttcatggacaagaagattttaatcttgttaagataatagtgctcctcaaatagatctaaagattcagtacaatctctgttgcaactgggattctctaggccagttgacttctttgtacaaattgatgagctgatcccaaaattcatatggaattgcaggggactcagaatagccaaaacaatctttaaaaagaagaataagttgaaggcctttcaaatttcataacttcccaatttcaaaacttacaataaagtgacgataatcaaacatatgttactaacatagggataaacatatagattagtgggatagaattgagagtctacaaataaatctatatgtctttggtcacccgaatttaacaagggcaccatggttattcaataaagaatattttttaaacaaatggtgctaggatgattgtatatccacatgtaaaacaatgaaattgggcccttacctcacacaatatagaaaaattaactcaaagcagatcaaagatgtaaatctaagatgtatgtacatataaatctattaaactcctagaagaaaactcagggataaatctgcaggacctcagatttgccaacgaattcttaggtgtaattcccaaaacatgagcaacaacaacaacaaaaaattggttttcaccaaaattaaaattttctgtgcttcaaaggatgctatcaagaagtaaaaaaacaacccatggaataagagaaaatattttcaaattatatatcccctttggaacttgtatccagaatatgtaaagacccatacaactcaataataaaacaaattaacccaattttaaaatgggcaaagaatctcaatagacgtatctccatagaaggcatacaaatagacaaagcacacggaaagattctcaacatcattagccatcaaagaaatgcaaatcaaaatcacaaggaaataactcttcacaccccgtaggatggctgtattgaaaaaaatataacaacaacttttgtcaaatgtggaaagaaattagatctctcatacattgctggtgaaaatgtaaaatgatgctgtcactttggaaaatggactggcagttcctcaaattgtgacacatagagttacatgtgtcccagcagttctactcctaggtatatgccaatataaatgaaaatatctagctacaaaaaacttgtacacaaaggcattattcataacagcattattcataacaatcataaggtagaaacctaaatgtctgttaactgttgaatagataaacaaaatgtggcataaaatatggcgtatccatacaattaaatgttatttggccataagaagcaatgaaaatacagcagttagtgatagatgctacaataagaaggaaacttgaaaccatgaaactattaagctaagttaaataagacagccacaaaggaccacatactatataatcccatttatatgagatgtccagaataagcaaatccatacaaacagaaagtagattagtgattgctcagggctgggggtgatgggtgggtaggagagtgatagctaaagggcagaaatgttctgaaattgactgtgggggtggtttcacatatctctgagtaaattaaaaccatccaattccgtgaatttagtgggtgaattcacatagctgtgaattttatctaaattgtgaaaataaaacaggaatgtgatgctctaaccagcataggcccaggccgcatgcttctggggaagaaattccacctgaatacttgggctgtaaataggtcattttcatgggaaaaggatgaatagatgccagatggtaagaagggtgaaagtctactacacatgtctgcgaggtcggtaagggatctggtctttgcaaaggaaggttatattagagctcagttgagaagagaaagggaaagggactcaaattcatgcttaagggtgctgtgacaggtatccatacctttattaaaagacatgtacaggaacgttcatagcaacacagtttattagccccaaatatccatcaatatttgaacaaataaattgtggtatattcaaaatggaataccatatggcaacaagaatgaccaaactacaaaagcatacaatatgaatgaatcccataaacctaatattgaatgaaaagagttattcagacagatgtagtgcctcaggcttgtaattcagcaccttgggaggctgaagcgagtggatcacttgaggtcaggagttcgagaccagcctggccaacatggcgaaaccccatctgtaccaaaaatacaaaaattagccaggcaggatggcatatgcctgtaatcccagctacttgggaggctgaggcaggggaatcacttgaacctgggaggcagaggttgcagtaagctgagattgtgccactgcatgccagcctgggcaacagagtgagactgtctcaaaaaaaaaaagaaaagagtcattaacagacagacaaacaatatgattccatttacataaagttcaaaaataggctaaatgaatctatgctgtaggaagacagattagtatatatccttgtggggggctgtgaatggatgagtacaggagaggaatgactttggggtgttgacagtgttctgtttcttgatcagggtgctgtttatatgaggtgttcactttatgaaaattctttcagttgtgcacttgttatttactcaccattctctatgtaagttagattgtgacaaaagcgaaattaaaaagaaactaaatacccttgttgttgtttactttccctaaagatagagagcacatcgtgtttatttctaatgcttattcaaaggggtagagactctgagaaaggatgaggtggcgggataactacttacaagagtcacagttacggggctattatttcctgggcatggaaagagtagatcccttccagcctagccatttcattcttattgtcttggaagcaaactgtccagctgttcttcttaacgtcaggttaacaatgattgtggtcattccctgctgcatgggtcaggctgtgagacaccctccccttaaatttacatagagacagaaggtatagacaggtgcaaatgggaagggaacagcgtatttctccactgtgtgcttatgtccaaattggaaaccagccttattcttgctcactaattattaaggaaaataatttttaactatcaggacactgttcttcaaatggtgattgggtgaaggagattttctttgagttctgtgaaatactaaaaattctatgtgttgataatgactaaaaatatattttccacttgtaaagacaaaacttctgtattgcaaagttattttaatagaataaaatcttagtttcttgagtcagtcttttgcaaatagggttccatgtataaactatcaagaaaatatttccaataaatgcactggggtaggtttagatttatttgacatatacaggaatatttgagggaagggagcaataaattcatctctttaatttgctgcaggctttccttagagggagcgcttttttagctggtgttaagatggagaaaggtgccttctatcgtgctgttgctgaattccctgctccagaaacatgcagaacattagcatgacccaactgcttgaaagcaaacaagatgctcttgtcttaaaaagcatcatttcggaggaagaaaagccataatgaaccctccctttttctttttcttaactgaggagtagcaaatggtatttaagctgttatctggcaacaaaagtttcaagtaatgttttttaaaaaagcctgccaacacttctttctgctgggcactgatatagctgagttaaaggccctttcgagatggagaatatgacaagaaaagttgcacacccctaaccaaagtgggctttccaagagctagaataaagccacttcattaaggtttctcacactggtgttttttggcagcatttttcaaggatcatttcctccatgggggaaatgaagtggcagtgtctttcctaactattgctaaaggtgaagtaagaatttgaattgagaaaggcagttaaaatagtatctgaacttttgaacttcctgatcagataattattcttgaaactctgtataagatggaaaagagaattaatgcctcttaaagtgtttaattttagaggactatcattattaaatagtactccttctataattttttgattgttgagtacaggcatgacaagaatttataaagatacttctgattgataacatagggtataaacagaaagttctcttaaataggaaggtgtatatgtttggaaattggacttgtctcttttgcttagacgtgtgtataaattaatgcaagatatttgtctatatctcaactccgggtctccctcctgcatatccaactacttactagacacattcccttgaatgccccgtaggtactttatttcaacatattcaaaataaaactcatcatctcagccttctcctgctcacccaccttggccctttactactgtttcctcattcttttttctattaatcatcgttaagccagtttccaaaatcaggcatctaggtatcaaccttggattctgccatcactgatgccacataccctaataggccacttctggtaaatttcctaaatccactcactttcagcaacccactattgcccatctacaggggaccactatcattctaccacttgactctttcaacattctgctaacaagccttcttgtagcccttcactcttttgcctccttcaagccatcaccacgagagggatccaagactcaactctccttttttttcatttctataccaaaaccattctttgggtttctgttcttaggatgaactcctcaacatggtgtgtaagattctatatactctgatcttgaccctgcttactactctcgctgatgtgaagcctcctgttcctattatctctgagaacacccaaccctgcttggtggcagcaagggacagaaaaagcacttgaggcagcaggctgtcagatttgctaatagtgcaacccaactcataaaaaccaccaagtccaagacaaggcctctttttgtgaagtaacaataacaagtagaacagacatttagtcagttttcactggctgtaactgtactagtgagagaaagccctgctccacagtttcttgcatcactacactctgggaagccccagtactttaccatgcaagtgtagccccacatcatctcactctttgccgtgagtttaaattcctccaactctatccaagggtccacgttcccctatccctggatgccatgtgtttcattgacatgagttttcctcctattaagcatggaggggtcttataagtggcgctgtgaggacagatgcttgcactttgtcttgacctctgcttcagcaagtgtattgtagctacatccttagctcactttggttttagtctcaagatcatcccagtcccctcctctatatttggttcatggtttcatatactgttaaccaggaatgctaaaaatattaatttggtgcattatatttatgcgaacacttgagatgtttcaagcatgcaggaccacctgcagaatctctggaagggtttatttcctatgcacacaattagcccaaaatctttttaatacaatagatttttttatgatactatttgttacttaccttttaccattttccttatcccacctatggctccaagcagactaaatttctctcaggttcttatttttgttgtgctctctgtcttagtattttcaggctgctataacaaaatataccatgaactgagtggcttataaacaatagaaatgtatgtctcacagttctggaggctgggaagtccaagatcaaggcagtggcagatttgatgtcaggtgaagacctgtttcctggttcatggatgggggcttctcactatgtcctcacatagtggaaggggcaaagcagctctctggagcctctttcattcataagggtactaatcccattcacgaggactctgccattacaacccaatcacctcccaaaggcctcacctcataaccttatcacatgggtgattaggtttcaatatgtggatctgagggggacaaaacattcagatcacagcagtttctttcaagacttttacacacaggttgcctccagatcacaaggctcttacccctcttttgttcttggctactttataacatccacttagacctcacttccttcaggacacctaggttagacctttgcctgtgtgcttccctagcaccttccactcccttcacatagcacctaacacactctgttgggtttctctgaggtatgtaagctctgtaaccgcagggttcctgtctttcttgttcatccttgcatcttcaaagcctgccgcattacctggcccagagcaagtacttaatgatcatttgttaatgaatgaataaatagatttttccattaatcatctaatcagtgaatttacaattctatgcaattctttgatgctctaagaaattgaagttttattttctgaagttatatattagttttatttcctaaggaatttgatttatccttactttaaatcataactacccagtggttattatagctatgctgccatatggtaaaacacatgaagcatctaatattgccttaagaaagctgtttcacagtaaaaactcttcaggcccttctctcggcacttttcattttatgttgaaattattggtgtttgtatctctcttacctgtaagacattaggtgcctcaaaggcagtgaccatgtgttattcaactttgtatcctcacaaccttgtatctagtgcagtgttggaagtcagtaaatgtttatataaatgcttaagataggccagaatccacatcttggctcaaaaactgtataactgccaacacccatctctgtacttacactcccaaagcctcagtttctacatctgtaaaaatggggattctgctgtttaaaggatcatcttgcagggttgttatgaagtattacataaaatataatgtaaataaggaactcagcatagtgactgaaatataggaattatgaataagctaggatggggataaatctaagtttctttgtgaagacatatggtgtgtcaaaatgttaatttttcactgtcacaggctggcaagacacggtcttagatctagtaaaattgttgcaaaaagaaagcaaagaggcaaacttcccaacttttatattaagaatatttgtctgaaatataaaacaaagtgagaaattcaatgcaaataaaatacactacaggaaaatttatagagtgctcaaatggatgagttgcataatttgtcttatgaatatttactaaaagcaaaataaattggacaaataatattcttggactgtaaatcattgaaaatgatatatacagttggagaaaaggacaagaaaatcatagcaggacctactctttcctaattacaactccatagagttgtctatagtgtgcttgtttttcattaattttgtgattatccttcccttttctttgaaataacaataagaaaacaccaaggaaaaaggttctgtagtcataatatgcttaggaaagtcaagatgttaacattcacattctaggactgggaaacaaattttaaggaaaaataactttacccttaagccttaagcctcaggtctcccagtgtaacatgtttcaatttgctgagactaaggtgtttggctggattgtttgctgttgtctgatagagttcatcttaaagtagtttctattcttgtatgggtttgtctgacaattttcatatcatttagtgagaatttgtatttttttcaattgttgcctattcctctgtaattattgtaattgcatcttattatataatttgcgtaaatatatgcaatcatggaattagaaaacgcgggtggtgatatgcagtgtcacaactgcagtggttaaagatgtgtgatttttttaatctttgaaaaaaataaaagcgaagtaaatattgtaatttcaggggaaagcgttttagctgtctaaaactgattgcccagagaaatcaaccaaacatttttatttagacatagataagaggtttcatgtttttgactgttctaactcagagatttggaaatcttggttttaaaatatcagtttgatgactgctcaaacacttataaagtttcaatattaactttaaactataaaatactgaggatcgtatgcttctaatgataccttttctgtaggttgttatcaatgtgagtttgaataagcatttattaatactgtgaataagatgcatattatcaatattaacgtctgcatccatacagttggaggtatttatgttgatgtagacaaagacacagacagtggaaatttatatgcctttcaaaatcccagtgactataaaattctgctcctctgactatacattaggtaaatggtatatttaaataagtggtcaaggcaaaaaaaaaaagagcataattcaagttcagcacccactgcaattgtagatgataaaaatgaggcattcatcaagctaaccctttcgcctctagaatttcatgtgcactgagagaaaagtccattgatctacattcagctcttaaaaactgcacttgctgttagaagacagaacatacactcaggaaaaacttcaggctgatactgctaagattttaacacatttataaaacttcccatcaatacctaatttattgagagtttttagcatgaagtgttgttgaattttgtcaaaggccttttctgcatctattgagataatcatgtggtttttgtctttggttctgtttatatgctggattacatttattgatttgcgtatattgacccaggcttgcatcccagggatgaagcccacttgatcatggtggataagctttttgatgtgctgctggatttggtttgccagtattttattgaggatttttgcatcaatgttcatcaaggatattggtctaaaattctcttttttggttgtgtctctgcccggctttgctatcaggatgatgctggcctcataaaatgagttaggaaggattctctctttttctattgattggaatagtttcagaagaaatggtaccagttcctccttgtacctctggtagaattcggctgtgaatccatctggtcctggactctttttggttggtaagctattgattattgccacaatttcagatcctgttattggtctattcagagattcaacttcttcctggtttagtcttgggagagggtatgtgttgaggaatttatccatttcttctagattttctagtttatttgcatagaggtgtttgtagtattctctgatggtagtttgtattgctgtgggatcggtggtttgattgcgtctatttgattcttctctctttttttctttattagtcttgctagcggtctatcaattctgttgctcctttcaaaaaaccagctcctggattcattaattttttgaagggctttttacgtctctatttccttcagttctgctctgattttagtcatttcttgccttctgctagcttttgaatgtgttcgcccttgcttttctagttcttataattgtgatgttcaggtgtcaattttggatctttcctgctttctcttgtgggcagttagtgctataaatttccctctacacactgttttgaatgtgtcccagagattctggtatgttgtgtctttgttctcgttggtttcagagaacatctttatttctgccttcatttcgttatgtacccagtagtcattcaggagcaggttgttcagtttccatgtacttgagtggttttgagtgagtttcttaatcctgagttctagtttgattgcactgtggtctgagagacagtttgttataatttctgttcttttacatttgctgaggggagctttacttccaactatgtggtcaattttggaataggtatggtgtggtgctgaaaaaaatgtatattctgttgatttggggtggagagttctgtagatgtctattaggtctgcttggtgcagagctgagttcaattcctgggtatccttgttaactttctgtctcgttgatctgtctaatgttacagtggggtgttaaagtctcccattattattgtgtgggagtctaagtctctttgtaggtcactcaggacttgctttatgaatctgggtgttcctgtattgggtgcatatatatttaggatagttagctcttcttgttgaattgatccctttaccattatgtaatggccttctttgtctcttttgatctttgttggtttaaagtctgttttatcagagactaggattgcaacccctgcctttttttgttttccatttgctggtagatcttccatccttttattttgagcctatgtgtgtctgcacatgagatgggtttcctgaatacagcacactgatggctcttgactctttatccaatttgccagtctgtgtcttttaattggagcatttagtccatttacatttaaagttaatattgttatgtgtgaatttgatcctgtcattatgatgttagctggttattttgctcattagttgatgcagtttcttcctagtctccatggtctttacattttggcatgattttgcagcggctggtaccgtttgttcctttccatgtttagtgcctccttcaggagctcttttagggcaggcctggtggtgacaaaatctctcagcatttgcttgtctgtaaaggattttatttctccttcacttatgaagcttagtttggctggatatgaaattctgggttgaaaattcttttctttaagaatgttgaatattggcccccactctcttctggcttgtagagtttctgccaagagatctgctgttagtctgatgggcttctctttgtgggtaacccgacctttctctctggctgcccttaacattttttccttcatttcaactttggtgaatctgactattatgtgtcttggagttgctcttctcaaggagtatctttgtggcgttctctgtatttcctgaatctgaatgttggcctgccttgctagattcgggaagttctcctggataataccctgcagagtgttttccaacttggttccattctccccgtcactttcaggtaaaccaatcagatgcagatttggtcttttcacatagtctcatgtttcttggaggctttgttcatttcttcttattcttttttctctaaacttcccttctcgcttcatttcattcatttcatcttccatcactgataccatttcttccagttgatggcatcggctccaaacccacaggcaatatcatactgaatgggcaaaaactggaagcattccctttgaaaactggcacaagacagggatgccctctctcaccactccttttcaacatagtgttggaagttctggccagggcaattaggcaagagaaggaaacaaagggtattcaattaggaaaagaggaagtcaaattgtccctgtttgcagacgacatgattgtatatttagaaaaccccattgtctcagcccaaaatctccttaaactgataagcaacttcagcaaagtctcaggaaacaaaatcaatgtacaaaaatcacaagcattcttatacaccaataacagacagagagccaaatcatgagtgaactcccattcacaattgcttcaaagagaataaaatacttaggaatccaacttacaagggacatgaaggacctcttcaaggagaactacaaaccactgctcaatgaaatcaaagaggatacaaacaaatggaagaacattccatgctcatgggtaggaagaatcaatatcgtgaaaaatggccatactgcccaaggtaatttacagattcaatgccatccccatcaagctaccaatgactttcttcacagaattggaaaaaactactttaaagttcatgtggaaccaaaaaagagcccgcatcgccaagtcaatcctaagccaaaagaacaaagctggaggcatcacgctacctgacttcaaactctactacaaggctacagtaaccaaaacagcatggtactggtaccaaaacagagatatagatcaatggaacacaacagagccctcagaaataacactgcatatctacaactatctgatctttgacaaacctgagaaaaacaagcaatgcggaaaggattccctatttaataaatggtgctgggaaaacaggctagccatatgtagacagctgaaactggatcccttccttacaccttatacaaaaattaattcaagatggattaaagacttaaatgttagacctaaaaccataaaaaccctagaagaaaacctaggcattaccattcaggacataggcatgggcaaggacttcatgactaaaacaccaaaagcaatggcaacaaaagccaaaattgacaaatgggatctaattaaactcaagaacttctgcacagcaaaagaaactaccatcagagtgaacaggcaacctacaaaatgggagaaaatttttgcaacctactcatctgacaaagggctaatatccagaatctacaatgaactcaaacaaatttacaagaaaaaaacaaacaaccccatcaaaaagtgggcaaaggatatgaacagacacttctcaaaagaagacatttatgcagccaaaagacacatgaaaaaaatgctcatcatcactggccatcagagaaatgcaaatcaaaaccacaatgagataccatctcacaccagttagaatggcaatcattaaaaagtcaggaaacaacaggtgctggagaggatgtggagaaataggaacacttttacactgttggtgggactgtaaactagttcaaccatcgtggaagtcagtgtggcgattcctcagggatctagaactagaaataccatttgacccagccatcccattactgggtatatacccaaaggactataaatcatgctgccataaagacacatgcacacgtatgtttattgcggcactattcacaatagcaaagacttcgaaccaacccaaatgtccaatgatgatagactggattaagaaaatctggcatatatacaccatggaatactacgcagccataaaaaatgatgagttcctgtcctttgtagggacatggatgaaactggaaatcatcattctcagtaaactatcacaaggacaaaaaaccaaacaccgcatgttctcactcatagatgggaattgaacaatgagaacacatggacacaggaaggggaacatcgcactcgggggactgttgtggggtgaggggaggggggagggatagcattaggagatatacctaatgctaaatgacgagttaatgggtgctgcacaccagcatggcacatgtatacataggtaagtaacctgcacattgtgcacatgtacccaaaaacttaaagtacaataataataaattaaaaaaagaatgaaaaataacaaaaaaaaaacaaaaaaacaaaaaacttccttggataataataataataatttttttctatttgagaatttggaatgttaacagaaaacatgttttctaccaaaataaaggtaacagtgatctggccatctgcattttaaaaaaaaaaaactcattgaaatactcctgtagaatagattgctcacttttccttgcttttgtagttcatagtttttaggaaaaaagtatcttttacctttaaaccaagaagggtatccaaattttgattgaaagcactcctgtacctcggttctcttaagtgtttctgagacatgagtttgcaggtaggaagctggtacggatgacacaactgggacagactggactaagccagcctcatccagctacatgcagctgcttcgcctttgtctccaaaggactcatcccttgttccacattttgaaaacaaccatgcatttacaaagaaattctcaatcttcttgttttctctttaattctctttaaaggaaggaaaaaaattctgtatgccctattcaagtgctatacattggtcttagggactggaactgaaaacttttatgatcaaaaaattttctcctccagttgccattctgttctaaattttactttattttttgatgtaggaatgtttctttaaacatcaagattttagtttccagtagaaaactaatgaattattaaaggatgggaacttgaagcaatctttagtgcttaataaggagaaaccacaaggcttgaataaactgttccatatttctcttttaatgctccgtttaaaatctagacggtgtgtcataagccttttaaaaaaaaacgattgtgtttaccaatatagaatatgagatttttgtttctttttaggtatttttcttgcaattaggatatactttgatgttaccatggctatggcttcacgttccaaacaatgagttttttcttatgtttgattaaaccaaaataatgttagtataatttccctgtaaattattatttgttgacaatcagtgttaatgccactaaaaattgagtataaatatcaacaaagtacattggtaaatgattaacaggacaaatgaaaagaaaaatagaaattctaaatagaattgctatacttctccagaattcattcctcctagaataactccctcagggtgaatgaaaagtcaggtgggcaaagctgtgagctccacctccttcaactatacaaattttgatttggtaaaggaaattttgacctcattatttcaccctgctttgaaccaagtttttatgcacctactttattattgctctttgcatgtacattaaaacaaatattttattttgactttaacctagaatgagcactacagttataagcaattgacacaagataagtctaaaagaaccaaaaaaacatagagtaagattcgtgatagacaaaaagtgacttgctggcaatattaaacattgctaaactcaagcaacgaaaaattaggctaaatattgtcaacagtgtcaaaatgttctccattcataatctattattgatctacgataactaataaatctgtacactgtgattcatgtttttggaaaattgaactcccaacttacacacaatattccagttgcctctgaggaatgaggttataaataatttaaaattttgatgtcttgtttttctttaatagaaaatttattgcctaggtatagtagtgtattagggttctccaggaatcaaaaacaataggcattataaataaataaatatataaaaatatatatttatatttgtatgtgtgtatttattataaataattggcttatgtgattatgaggctaagaagtcctaagagctatagtctccaggctggagacccaggcaagccagtggtataagttctgatacaaaggctagtaggctgaagacccaagaagagtcttgaagtttttcagtttgagtccaaaggcaggaaaagacccatgtcccagctcaacagtcagtagtaggtgctccctcttactgggacttttggtgctattcaggtcttcaactgattggatggggcccactcacattagggagcagagtaagctttactcattctaccagttcagatggttgtctcatccagaaacacccagaataatgtttgaccaaatgtctgggcactccatggccaagtcaatttgacacataagttaactgtcccactaggtaacatatgaagaattgttttaaaaaaagttattcagctgggtagaaattaccatctgtctagaaaatagagttggagaagagaatgaagctgataatgtgcctgaaatcttttttctggcttctattccagtctgagagtcaggaaaagaagagatctctaataaaatgcttctaatgtttgggtcatttttaccacaacatcagtaatggaagagaaagtcaaaagaatgaggctccaggccaggcgcagtgactcacacctgtaatcccaacactttgggaggccaaggcaggcggatcacaaggtcaaaagattgagaccatcctggctaacatggtaaaaccccgtctctaataaaaatacaaaaattagctgggcatggtgccacatgcctgtagtctcagctactcaggaggctgaggcaggagaatcgcttgaaccccgggggcagagcttgcagtgagccgagatcacaccactgcactccagcctagtgacagagtgagactccatctcaaaaaaaaaaaaaaaaaaaaagaatgaggctccaagatgagcacctgagcaccaagcagtcctcatccttctcactgctttggagtttgccagatttgggtactttgatccctagggaataaacactccttagctggacagcaacacaaataactcttaaatgaactgcgtctgttacacacacacaggcacgcatagagtttcaatggggtttattgaaataaagtggcctctacactgaagaattgtaaggactgtattctatccatttcctgtttacttctccatttatttgtattcataggtaaggtttactagcacatcattaagatactgtaaaacagcattaaaatcctaccttttaatttcctcaggtaagcgcctctcttgtcttagcaatgcctcggttctcaggccttgtttatctttctctgtaattgtgagtgaggagctttctgaactggataactgcctctgattttaccccttcaaattcatcttccttgcagctgattgagtgatccctctgaagaacaaacatgattgattgaagaataaacgtgccctcccaacttaaacagcttccaggccgcctcagtaacgtgaggattgagggaaaatgcctcagcctggctcagacagtgcctcccgtcttgggctgcttggctcctctcttcccattcagccttgttactctccagaagtaccaagcagcttgtaggttttcaatgccccaaggaatgtgtgcgccattcttcacactgttcttgctcctagatggctccccacatgctgaaaacccccaccttcttcccttaatgggtttcgatttagtcttcaaggcatgtctcaggcatgttcttttcccaaaagttttctgacactccctctgttaaaggacaaggtgcctttcctctgtcttttggaggaaatttaccagtgatcacactgagcatatatccgatagtctcatctcctcagctataaagtctttggttttagaacctgtattaattcatcttaacatcccctgtgcctaacagagtctaagtgctgagtaaatgggggctgaactaagctaaattccaaagatcaagccaagagttcttagttacttgaaaaacaaacaaacaaacaaacttctgacctttcttcattataatcttggcaaatcagaattcctttgccctaaaataactgtaatcaaggagttgacgctaaagtgatgatgagaactgtagtatcactacactaatgaatcttttagccttgtacaagaaataatagaaaaatccataaccagtttcacagagaactgctaataaaaatcagaaaacactataaatacggcattaaaaaaggtaaaaagctgggctgaagcttaaagatggaaatatttgcagaaaactaaggcagtgagaaatgatgtcctgtatcatgttttgatgtgttatattcatctttctggtgatgactttatttcacatgtaaattaggaaaaagggaaaggaaagcatatccatatcattcatgtccagggaaggaaagtgaagtatcttagaacagcttctcaagtcagctctacatagctgggcttttgaagtgctggtgaattttttttaatctcgccttctacaaagaaataacaaagcttagaaatttaaaaatccaggctactgtcaattctgtgactttccatgaatcagtctcgttattctttgacatcttaaaagaaaacagccatatgactgataatctttggtgaatttcagatgcatgtgccatagaaactgtgaagaaatttaaatcttaaagtactgatctttgggcttcttaaaaaaccttccagttcagatataatgtctgacactaaataatcaacttatctactttactaaaaatggccagtaccccaaactaacactgtaagtttacccagttgggaattttaaattgtggcttactctgagtgcttcatagaagttcccactcttacctccttctgaaaagttttttatgcatagtcacatgctgtgtacctgcattaccttctaatactggtcacattgcattgaatcagggaacaatggctggcccaaagtcagcctgtgggctaatcttataagtagatatggccaatctggcatttatactggagagtaactgacaagccaatcagatactctcttgaagagtttgaatatggaaacacaaataatagagtaatgcccaagcccccaaacagaaaacatatggtggaaagtagaatagagagctcaaggtgggttgctgtagtgtaaaccatcatttagtcatacttaaggtacggtcatgagaataggaaatagccataatgaatgagaagtgaactgctaatggcagagaatgtagactacctgcttgagagatttggtgaaggaaagcaataaagtaatattttagtgggaattatgcctgagagactttatttagagtagactggtagtaggaacaaatttagagtctaaggcatagcttgaagatgaaagaaaaaagaaagttacaaatgtggcatggccgcagaggagaaaactgaaaccaaactgggaagacagagtttatccttagaaagagagaaaaacatcctttctctgacacagaaggaatggagaaaagatagtggaagacactaagaactggaaagaaaatgagtgaaaaggggctcttcttttcccctcttggggactgatcttcagtacaaagaaaagtaagaaatacagaacaagaaaacaacagagaaaaatcaatgaaacaaaaaaatgattcttaaaaacagtcagtaaaactgataaacctctagtaagactcacaaagttataaaacaagaaagaagacagaaatcaccaatagcaataataaaatagggatttcaatacaaattctgcagccattacatggataatgggatactgtgagcagctttacattcataaatttggagaaatagaccaattctttagaaattacaaactaccaagcctcagccagaatagttctataaccattaatgaaattgaatttgcaactgaaaaactccagaggtatgcaatactaattcaccatttgaaagtcaataaatcattaacagagtaaaggagaaaaacatgagtatctcaactgacacagaaaagcatttgacagtatccagcacccattcgtgataaaagctctcagcaaactaagaatgagaagggaacctactcaacttgatacagaacatctacacagaaacccttacagcatatatcatacctaacagggtaagactgaatactttcctttaagatcagaaacaatgaaaggacgtttggcatcattcgtattaagtatggtgctggaagttccaaccactgaaataaggtaagaaaaagaatataaaaagcatatgtattgtaaaggaagaaataaaactgtttctatttttagatgacatgattattctatttaggaaattccaaggaatctacaaaacaagtactgctagaactaataaataaattcagtatgattaacaggatgaaagaacaacatgcttaaagcaattgcatttctgtattcctacgatgaacatgtggaaatagaaatttaaaacgtaaaacatttacaatcactccaaagtaaatgaaatacttaggtataaacctaacaaaaaaatgtacagaatctgtctgtgaaaaccacaaaatgccataagagaaatcaaagatctgaataaatggggagacatactgtattcatgtatcagaagagtcagtatagtaaatatgtcagttctccccaaatttatctatagatttaatgtaattcctatcaaaatacaagcaagatatttttggagcttattctaaaatgtatatggaaaggcataggcccaagaatgcctgaaatgatcttgaaaaagaaacaaagtgagactattcactctacctgatatagctatggttatcaagatagtgtggtattaccagaggtatagacacattgatcaatagaatagaatggagaactcagaaatagacccacacaaatatatacaactgatttttgacaatggtgcaaaagctttgcataagaaacttttcaaaccagcctgggcaacatggcaaaaagtctctactagaaatacaaaaatgagctgggtatggtgacacgcacctgtggtcccagctactcgggaggctgaagagggaggatcacttaatcccaagaggctgaggctgcagtgagctgtgatcacaccactacactcccgcctaggtgacagagtgaaaccttgcctcaaaaaaaaaaaaaagaaaaaagaaaagaaacttttaagaagaaagtaagaatagagggatgaatgcatcttaaataatgttggtgcaattgaacatccataggcaaaaagaaagcctataaaagggcaacttgagggatccttatggcaatgaaatattttctatctcaactggatcagtgtcagtaccctggttatgatattgcagtatacttttgcaagatgttacaattggggaatactggtaaaaggcatataagatccctttgtattatttattgtaactgcatgtaagtctaattattgcaaaaaaaattgctttaaaaattaaacaatattacctaatgaaaaaaaaaaaggagtgagtggacaatcaggaacagagaatggagacttacagccattggacggggtttggaacagtccatgtggaagtacttgtttgtcaactggagatgagtaaaaggattacccacagccgagcactgtggctcacacctgtaattccagcactttgggaggctgaggctggtggatcacttgaggtcaggagttcaagaccagcctggccaacatggtgaaaccccgtctgtactaaaaatacaaaaattagccaggtgtggcggcaggtagctgtaatctcagctacttgggaggctgagacaggagaatcgcttgaacccaggaggcagagattacagtgagctgagattacaccgctgcactccagcctgggagagagagagaaactccatctcaaagaaacaaaacaaaacaaaaaaacaaacaaacaaaaaaaacagttccgacactagtcccactgaggttagatctcatggatttgcagcagaacaattacgtgtatttggaaaagcctgatctcaagatatgatgacttcatatcacatctcgtacatactatactgatattcacagaaactataaactatcagctccaacaccttaaaaattaatggacattccaaagaaaatatacagcatgcactttcctgagcttttgcaaatgcatcaaatgaaaattctattgaaaatatggtcaaataagcacagcatgatggtacaaaaatgtgatgccaaggagtaggagagacagatttctgctgggttgtcttaatctgtgagtgtgtgagagtgggtgagtgtgtgcatctatgtaagttgaggggtaaggaaaggacctttacctccagataaagaagtaatatttctatctacaaagcccacaaaccagattctgttcagtagcattgttttcccattccactaagcccttccattccaatttcaactgcgagatgtgaaatgcagcacattgaagagatactctgaaagtatctagagatcatgcttctattgggaggagaagattaatttgacttaagtttctggagagcagatccattttgtgcatcttaatatcccctccacatttacttttatgtaagaacacacaagtatcttctgagtgactggatgaatacactccttttaatagatcaaactttgtgtctaacatttatcggacttaatggaggataccaaggcatttaatatactgttctttccctaaaatattcataaccagaatttttgcctgtcaccttttctctacaatgacaacttcgctgaagaattagttcaaatgtgtttctttgtttcctcatatactttcatatatgtaccaaagttccatctacaccatatccttggtgtacaatgactggagcatccacagttctatgagctcaaacacctagggtttcagaccaagggcaatttcaacttaggtaaccaaaagcttccaagaaaccctgaagaaatgtgtagtcctttgcgtccaaacattcctgacctgtacagacccatgagcagcaattagatttatttttcagtgttttgaaactaaggagagtaagtaattctggatggcctggtgtgttagtctgtttttgtaatactataaaggaatacctgagactggattatttataaagaaaggagatttaagtgactcacagttctgctggcttcacaggaagcatggcactggcatctgctcctggtgagggccccaggaagcttacaatcatgatggaaggtgaagggggagccagggcatcacacggcaagagcagaagcaagagtgagggagggggaaggtgctacctacactcttttaaacaaccagatcagtctcatgaactaacagcaagaattcactcatcaccaagaggatggtgttaagccactcatgagggatctgcccccacgatccaatgcctcccagcaggcctcacctccagtactggaggtcacatttcaacatgagatttggagggcacaaatatccaaactgtatcacctggttttcttaaagcaatctatttgaacttgtcaattcaaagccaaagacatagtttattattaccatcagagtcactcaatcttgaagatgatagggctgagaggaccagagctgagtccattttccttcctttagtcatcactgcactgaaattagttcagattaaaaagagtgagttctttgctttaaaatttcaaatgacagaggctctcatggaaatgccttcaggagtttcaaagcctccatcattaggtgcagccatccaaggcaaatatttgatacttcgtgaagagaagcgataagaagatatgtgtgtcctacaggatacattccataatggatgataatgttttaaatatatatatatacaaataaaaaccgagattctaattttttcaggtgtttcattagtaaatataaacatttcttccatctcttgaactgtaggaaatacaaatttccttttcaaagactctgttttgcatttctcaacattagagaggcaatattttaaaaggtaactagtgataaaactctctagaagagatggctaggacctagaaggacattttgatccataagccagcaacactgaaaccaggactttcaacccacatgcagctctttaggtaccacatgcagatttgatgggctctctggttacagaaacctggccaagttcgcagaactctgacagctccgtgcctcccactccagctgaaacacttgtgggaaaactgagcaaatggatctgcctcgcaggatcagaagaagtaggcaccagcaattccatggctcttctcttccttgtagttttatttttcttgttatgaaataaagcaaagtaatacaaaatttataaagtacaaagcaaattttaaaaagtaatgaatgctctaaaagagaagtcacttataattccactatcaagtgtgaatcacttttatctttgcatataaatcttttgcaaaagttaaaatagcatgcttatttagaaaactcaactatcacccagcggcaaccattgctaatctattggtgaccacttggtcatctctttattcatacctacacacacaggtatctctgtaatttatgtaggggtcactctctatatcatgccttgcatctggctcttttattcagttgaatttcagagagatctttctattatcaagaaatattaaaaaaagtattttaattgttgcagagaatttctttaaatggacagatagatgttctagaatgtacgcagctaatccttcatttatgagtatgtaggttgtttctaggtttctcttctctgaaataatgcttcagtgaagctccttgtacatgcattcttgtgcttaacctaatagctccttgatataaatttctagaagaggaattagtggttcaattttgataagtatttcaggactgccaaaagaaaggttgtgaggacgtatgctgtcactagcaatacaggaaaagatggattctccatacctttatcagtattactaatatttctctaattttctaggagaaaaatgaaatattaacctcatttgttaggtaaagatgatgggccatttttactggtaatttttcattaatagtacaatcaaacatcttttcagatattcatttaccattttatttcttttgtgaactgctcatttttaaattgtgattttcatcttatttaaaattgctttgtaaaggtttactttatattataaatatacacttcatgtctgtcaggtattgcaaatattttcccaatttgttatttgtcttttgatttatgatgtccttttactgtatacaagtttttaaattatgtatatattttaacaccttcaaataacacctagtacataatttcatatttggcttttgcatttttaatattgtattgcttttgtttttccttgttattcagagttctaaaaaatattttcatgaatatataaaatatattttaggaatgtaccattatttcctcaacattggctatattgatatttctcaacactaatagtgctgtattggaggatagtgaggcgatgaagagagagaaagatacagaggaagagagaagtagctgtaattcaaaactctagtaagaagagaaaaagcaaagtgaaactgtttcctttatcactattgggaaagggacaaagagttagcaaaggcctgatagtgatatcttgaaaaaaatgaagagaggcatgttaagaaaaagtagcccctggggaaaataaataattctttcttctgagtggcagagaactatagcacattcaatttgtgtgttttagtagacttataattttaattaagcctctgggttttttctttgtgcttgtcccttttgttttaatgggacatgaggtcttttctttttttccttatttgtagggtccccagtgacctctattgcattttgttactcttggcaacaataaaatgtatctattctctttaggcttgtctaataagtggcattattgcattattcaagcatttaaatttgattgatgagtttatccataaggttgttcacaaatctgttaaagtcatttattttttattctgatataattgtgcatgccattattaatgctgctttccagaagagtaaccacatgttgtagggcctaatttcaggttcaaaatggaaagtggtgatcttctcaatgtgtgatttattggaggaaaatggagcttgatggggacaatctgggagtacatggttgggagggaacccccagatagacttcatgttactttgctgttactcaacagtttgcattgtgggacttccagtgccagtcagggtgaaatatagtttcacattttactaccacctctattgtttctctctcttttctcttctaagaccagggaatagaacataaaggtcgacagctttatcctaatctgaattgttttgaatactgcacttgtattttcatccttcattgatttttaatgcaatgtgatgtattatagccatattcattacggtgtgctgcaccaaaattgtgcttttggaagtgtggcttttaataaaaggaaacacttgtgattatttgtgccatatcagctgtgtcacaagtccttaatatacgtaattcagtaggggttcttttcccaatttcatagcaataaaggtagcacattggctccattgccttacttaggtttcagagttgtttggaaacattaaggattctgattttagtttccatgccatttcatttacatcagatgagtgagtccatcccaaaaaatgagttgggtacgtatttggacagctacaataagtgagaagggtgccttattttgcaaatgggcatgtctactcctgcctagcctcatcatctgtcacctttgctctttagaatgtggcttcttgccaccctcaccctactatccccacccctctgcctgaagctgattaatcacttccaaggctgtttaggttctgttccacacctacactgcaaagttaaagtgtctgtctcccttatgtgcactttaaggacaagatccgggcctgtcatctgcatttcctccagggcttgctgcttaccatagagtccagcacaaggtaacatttaatggattcaattaagtgagcccaatgtcaccatcttagcatattgagccattaatacatggaattgattgttaaaatacggaggccagcttccttcaagccttactttctttcaaaaatatttgttgaatacttgctgttttggcacagagaacatagtggtgagatgatagaaataatccctggcttcagtgagttacaatctcatgaaataattcattagtcttgtttctccaattcacatcctttcaagtttcaggttgggaaaacaaatcaaatctcccctcatattaaaaaaaagtaaactaaaatactgcctctagatgtccaggtgcagggactcacacctctggtcccagcattttgagaggccgaggcaggaggatggcttgagcctagaagttggagaccaacctggccgagaccgtgagacctgttactataaaacattaaaaaatagaagggcattgtgttgcatgcccgtagtcccatctacttgggaggctgagacaggaggattccttgaactgaggagtttgaggctgcagtgagctatgatcatgcctctgcactgcagcctgggcaataaagtgagaccccatctctaagaagaagaaaaaaactgcatctggagctttgctacttggatcatagtgtagcagagatgcatggtatagagctatcctgtgcattacgatagctgctagccacatgtggctgttaacactgcagtgtgctaggtctgaattgagaggtgctgtcactgtaaaatacataacaggtcttgaagatttatatattaaaacctgttcatcatctcaataatttttagattgattatatgtagaaataatatttttgtagtttgaatttaataagatattattaaaactggggccaggagtaggggctcatgcctgtaatcccagccctttgggaggtcaaggtggaagaatcacttgaacccaggagttcaagatcagcctaggcaacataatgatacctcatctctacaaaaaaataaaaattgaaaaattaattacacttggttgttttcatatttttgtgggattacaagataaaatttgaaaaatagatgtagcttgtgtttgtggcttgcattattttgctatttgaaagtccaagtatagagtgaggcacagcatagactggaggcacattgcttcacttcaaatcctgatccttccccctactcgttttgtggtctttggcaatttactaaatctgtctttcattctttgtcttatcatcttgtaaaatcaagatagtgatagtacctaactcaaaatattgttatgaggatagtttatatgtctaaatcatttagaacagtatctggcatagagtgcatactcttcaaatgtttgttgaataagtaaataaacccactggtcatgtgcaccttcactcagtaggtagaattatcaaagaagtaatgcagtttttaagtagcagtttcgtgaataacctgtatttttctaggagcaatagtagcaattgtagactgacatggtgaacatttttgatggtttattagtttaatttccttctcctcactttcttcctctctccagaacaggtggaaggaaaggagcaaaactcaaatatattaatttcattactctctagtaggctttttgggagaatgattctgaaatggatggcaagtcaggaatttttttcttcgcattatggcagtttcctgttactttatgtaggtaccttgaaataaatctaacatatgaaaactcaagcttctatgttacagagtggattctttggatccattgaagagcattgtcagcagccatccagacacctccatgtattcatgtattcattaactagagaagagacactttgaagtcaatcaaaatttaaaatatttatgaagcctatatataaagggaagatatattggttgtggcagagacactcttaaagtggcctccaattcttgtctcctggtgttcacacccttgcgtgggacattcctcttgcaagtaggcaggacctgtaacttgcataaccagtacaatatggcaaaggggatggaatattcatgatgacacatatgcagtaacatgaaaataagatgtcagcacccatccttctggagtttctcctttgcttgatggctttcagaaagtatgcagccctgttgggggacctgcatagcaagagacttctggcagcttctagtgactgaatgtggcctctgccaacagccaacaaaacactgccaagaattaagttctcccaacaactggattaagcttataagtgaatccttccccagtcaaacctctgatgagaccacaccctgccaacaccttcatttcagccttgtaagaccctatcagaggactaggtatagtagtgccaaactcctggcccacaatacatatgtgttcttttaagctgctagtttgtggtattattgttattcatcaataaataactaatacactggcatttttactttcccaaatttaacctccaagcatattttatggcaaaagcaagacatatgcattgaaattattgggtgatttttccttttcttctttttactagcatcagagggatttaagtatatgatacttagcagtagaatcagtcactatatttataatatttcacagcatttaaaacagtatatacaccaaagactttaggttggcagacaatgattcagttattcatatgttgatctgatataactatgttgttaggaatgtatgagacacatatatttgggtttctgaagacagatatgaactgaagacaattttttcaagttattagcatcttccaggtggtagttggaatactgaaatggattaaatcacctgatcatctgtagacattaaagaaggctaaggacagagtccctgaagtaacaacatttaaggatcatgcagaaaaagaatcagcaaaagaaaaaacaaaccaggaaggtaaggaagatttaggagagtgatgtcagagatggaaagagtttcaagatgaagagaatacgaaaaaggagaagcaaaaatgagacctgagttaattggatttaggaattaggaagtgactattgacttcagcaaggtggagtggaagttggatttcagtgaatcactaagttaggaataaagaagtagcggtgaaatattcacttaggtaataactaaagggagacattgaactaaggaaagagttttccttaaatgatgcaagagatgtttatgtctgttggccttgacaagttaccagaagaggttatcatatgggaaaggaaaagagtaattgttaaagtgaggtccgggggttgagagggaatatgccgagtggcatcacaaagaattagcttgagatggaatagaatacatctttctctgactagaggggaggaaactagcctacatgaggaagtagatgcgtcacaggtgtgggggataagtcagagaatgcacatgtcttcaattttcccatttgctgagagtaactagggtagggttgagtagggctttaggtaagtatgtaagtaggtaaaactgctgatggtaattagagggaaagctcactaaacacaaatgagagtcttgctgagtagaaatgaacttctaaggggcattgagaatttcaccaaatctgaaagtaatatcattatgaaatctcccttggaattaaaggtgaagagatttcggtttgtgtccagcaaagtgagaaacctgaactggggaaataccctgcagccccacttccaagctgttgccaaggccatccctcttgcacacatgcagactttgctcatgcctcttggctgacaaactaggcttgtgttgtattttaccttagtatagttagaggaagaaaaaattaggattagttcttcagattggaaataaggaattccatatgtaggagatactctttgcaatggggtgtggcatgcccactttcttcactagacagtgtattgcagctttgctttcttcttcctgttggaaatatattttcagtcaccatccctgttttcccccaatttaagcgaaacaggcaagagccatccctcatcgttctctgagattgcttcttttggaaactgcacacattatatttcttagaggtagcttttttaaaaaagaagaatctaagaccatgaaactggaatttttgtccatttaatttcttaaatggaatcctgaaattttgtgtctagggaaatggtctataaaaaaggcatcttctatatctagatgatctgtgtatgggtggagctctggcaatagttactacaaaggtcgacattcagatcttctgaaattattacagcagtttattctttcatttagtatagtgatcaaatacctgctatctgcctggtgctattctaggctccagataaggacccctgcttcagggagctaacattgttgtatgcatgcagaggggaaaaggaaagggagtgaacctgaaaataaacaaatataatatgttttaaaaaaagatacattgaatcatgtttaagtatgaacaaattaaaatgaagagaggtgatggacaaaggctaggaaaaagaggctggctttagacacctaaaatctacagatttcagaagatttttgggttgtgaccagacagctaaacagtctgtgagtactttggcaagaacataaatggcgtaagaactgctgtgtccatatttttgaaagctgactctaagtcaggagaaataactatcttctgtgaacccgggagaagagacgtatccttgacattagctgaggtcagtatggccagtcaattcttttctctgccaaaaaaaaaaaaaaaaaaaaaagcccagaaagtaaggaaaacaagagggcaggagcctcatagatgaggaaaatcatatctttaaaacacagtttcttgttgataaataatcctcttactgcactggcaacaggactctctcctgccactccccctttgtcttacattcttaatcagttgattacataccactaaaaatacacataatgccacttcctcctttcctgatcacagccacaaacctccattttccttttttgttgttgtttgggcttttggttctgaactttgtgtttttaactacatttagagtctgggaaatggaggtttctgaggttacctttgaaacatctttgagtgacaggctccctttggccacacagaatatcaagagtggaataaaaagtgtggattcagttcaaactccggtagcttttttcaactcagaaatggaatctggctttgactagccccagggaatgtaaacagaaccttacctgtaattaacctagggcttctcttgttctcaatgcaaatggagttacaattgtatttctcttagtagaatagaaaggctgtgtttcagaggggagctggcagttgaatagaggacaagttatctgtctaactgtgacagctctctcctatctccttctagaaaagctgaatgatgataaaactgtagttgcatttgatgtaagacatatggtaattactataataatattatcacccgggttctgcagtggctttgtcagtgaggtgcaatttcacatattgtctgcgataaaatccccgtttttggttattgatagcaatgcctttctcaaatgctataggtattttgtgacagctgcgaagttcctgcttcatatccaggtaattgggttgagaataaggcctgcatgctaaaacctgccgatgtgagaagtagtgaaagcccagggagtactgtgaatattttggtagttattaactgactaaatgggaagcctttgctagtcagtgcttctgaagcaatcctagagaaaaagaaagaaaagaaaagaaataaaggcaatctcctttagaaagcctctgttgggtcttcaatgacgatgtgcaaattttgagctaatcaattatattatgaatctatagataatatttaaaagctatatacagattcacaaattaattgctttcatgtcattctgctattgattgtttcataagtcaaattttacttggcttaattactggtttaatagaagttatttcagcataataagtatgtgaccatgtaataaacatttttatttatttgtcacagaaggaattggttctatagtatattagcctgagcttagctgtatatatttaatttcatggctgtttccagggaactgaattttgaagacactaacagcatgttaaaatggactactataaatccttttttggaaatacgtgggaaataaataataaataacgacagtgtgtcaaagtgattttattgcttagattaataaaaggaaagtaatacaatgtctggataggggaaaaaatcagattatggggttttttccttgttaatgttatcccttgtgcagaattcattttttaaaaatcccaccaaagacccataaaacagtgagctctattctggagttattatttaggcaccgataatcagtagtggcaacattcagtgagtacgtcagagcatactcttgttgaatcaaataaatatgtatatgtaaaggtgcagattacaagttaattctactatgaagtgctaaataactagaaataatgtgattaatttggggataaaattggtgttgtattggttggttgttatgatttaaattccttggttaattcctttttttcctcataaaggggaaattgcccagtttttgaataattgaactgcaaagttagcacaaaaactgaagacctttggccctagcatttatagaaaaacacttgggatttctataaaaaacctatagcaatgtggtaatttaaatcattttgatgcaattcaattcaagggttgcaattattaaatgcctgcaaagtccagacactttctagcccttgggatacagcgatgaacaaaattaagttctacttccatgagcttacactgattaggcatggcttctgtgccagattatgggtataatataacatctcaggaatacttgctaatgacacaccagatgaagctgagattctgagtggccatttgttactaagagaaagaaccaagaattagctcctgtttgactccccaagcactctgaaccctagtgtagtggaaagattatcttctgcagaagtaaaaatattctggatttcccaaaagaagtttgctaacataacaggcaatagatacctctagttgggtggcatattttgcacacgtttgttaactcaccgtattatttccttcttcaaattgttctttgactattttccaagggtcttagcatttttacattcatttgaagctcattatacaattaaggtattatgcctttttcatgtgtactataactagtgttcccacctatgattttctttattttgttggtatatacctttttaaagcaaatgtctgattcattgtctttaatttggagcaacagacttatcttcagatggaagtaaaaactcaacttgtagcttattttgttgttcatagtctaaaatgtagtaagaaaaaggtgcaccccaagaataatggccagtgtgaatgagcccttcttcttggagaaaagatcatgggccagtttcacagaaggacattctttctttgagattttatacacatgtgctattgaaatttgaaggagaagaaatattttctatggcgtagttccctttgtagggtcaacccttaatttacagaacattattataagataatacgatagtgtttgtgaggttgtccaaagggaataaattttataatcacttatcttttgaaattgcattaattgttgaactactgataatgaaattttgatactaaagattttttctaaggcagaggttatgtggtcatgtggtggaaggagcattggactttggactttgtaccagaggatgtgggttttcacttaaaaatgaggatatgaacctgatgatactaagactgaaaagacaattcaagtcaggagactggaagagaagcagggtgtgtgtgtgtgtgtgtgtgtgtgtgtgtgtgtgtatgtgttagaaaggggagctataagagacatattttggatacattcctcagagatgccgtgttgagatgttttgtagataactgaatatcatctacctctcaagagagtggtatgggtgatagaatataggtctgttaacaacatagcagcactaatagaagccaaagagaaaaacaaatgacttggggagaaggtgtgaaatgcaagccctaaactgaccctgcaagtggtttttattattttccttgtttcttttggtttttgatgtttgaacatacatcttttctcaaagataaaagttttgcaaaatcacacagtaaaaataataggacttatggggaaaattgggatgtgacagatcactcaaaactcatagatgtgtaagcataacactaacaaaaataacaataaccttattaaattatcagcacccttaaaaagcatgttaacttcatgatgaagtttttagaaggaaaatatttgatagcttactggaagatggtgtaaggaagggttgaggcgtctgagttatagaggaaagagcagaagcaaacactcaaggcacttccaagtcagaatacatgcacacataaaggaaggatggaaaatggatgcagtcagctggctagtgcactgtgtgctcagctgctgttacttgttggagcaagatgttaggaccgtgagaaaaaccactgtgaacctgtacctcacactgatgttagccccattgttaccagaggagcacatgaaagaaacacttttcttttcctctgacctgcctggccaaataatatttataattcattactttcagtaaggacaagagaacagaactctctgtattccaatttgaacgccttatgactagggtatcaatatctatttgccacaagctccaccacactctattgtcttacatcccctcatctcctatccatttcacacacgtatgtttcctgtcggatttagtttgcaggcccttgtgtagggaagaaaagaacttagaggaaaaggttacatttaagggtaggctctaagaactgatcattagaaaggtagaaagagcatcgagaagaaaatgttagattggaaacaaaaggaggagataatttcagagtagagttgtgagtataagatcctgcagagaggtccattgagattatggcatctctccagtaagacagcactagtacctttggtaagaaaagtttttgcatggtgtggtgaaggcagagccaggctgccatgccagggaaagggagcagcaaagggtgaagaaaggaatatgctccactctttcaagaagtttgatgtggaaagaaaagagaaaggaggactggctgcttttatagggagacatgctgaaagagttttctttgtatggcaaggaacacttaaacgtatcatttgtagatggaagagaagtagctactggggaggaaaagggaaatgattgaagatgagagagcaagagtaagagaagagactaaatagaacaactctccagagagcttatttccattacataattcactccacaaatgtgggctcatctttgttgcatttctagctccttctgactggaagtgtgatttctagcaatatatttatagaatctcctctgccccccttcaaacacttttcaataaatgctccgtgtggttcatttgtaaagctatctctactgtagtagtttctaccagaagacatctacagataatgcaattcaccaagtcagcatgaagggttgaatccctggaacaactaggaatttttgcaggctatttctgctgtgacacagccctgaagtggctagcagatattcagcctgagtggaccccctttattactgatctattgcctgcctaattgtgcataacattccaaatattattaatttttaattatttacgtttaattatctgcattacttaagcattcgaattccacagctaatgttctcaatgaaatatttactaaacagtcaaacctcttggattccacagaattaaatgttttcaatttgcagcaaacctttcctccaggaggcattctttgcactctagtgttctggaggtggctgcagtctgggtggttatggcttcagccttaccatccttttcatctcagggacactgtcaactctaatgggatggattgctctgcttggcattagcattaggaggttgagtgccgttgggacactcgtgccatctctcttcccacttctcttctgttagggccagaaaatgcattaacaaggagccagttctggcgataggaaagcgaaacaacattattgtggtcaaaaggcagatgtggtcaaaaggtcaagaggcatgatgaaaactaataatagctctgacaagagaagattactcacagctgatcagccagaaagcttttccagagcaaaatcaggacccactgtcgatggaaatgctgtttccagaacagaggccaaggaaacaggattatccaccccagcattcctgacataaatattctcacctctattatcctttgtacagaaggagggggcccatggtccacaaaatgtgaattggtttcagttcattttctaggagtggaaatggacagaattgtgctaatgtacctatgctcactaacggtgtctcccttctcaccaactacaaatcactgagagggttgatgatgtgatctgtacgcatagtggttaagactgagggatatacattagaccttcattcattccacaactatttactgatcacctgccgtgtgccaggcactgtgctaggcacttgagagacagaatacagcaagacaaacatagttgcttcctttatggaacttatagtccagcaaatatgagactccctggatttgagtcacaatggctgcctcctagctgaatgactttggggaacttacttaacctcttcagacctcaatttccttatctttaaaaccggaataatcatagtactttcctcatagggcagtatgactattgaattgttgatatgtgaatgcatgtgaaactcataaatcataagattggcacttacagcttgtttcactgggttgtagattaggtgtgcatgtatggtttcactaaaagcttgtacttgaggcctaacaaaattagcaatttaattatgagtgtttaataaacgctataattactggacacgactctaagtagcagaagatatggccggggcgagcagatagatgttagagagtacaactttctgagtttgggtaacaagaagacacattagtcttatacctggcatgaaataagtgttcaataaatgtttattgttgttacagttgtgattatcattattaggccctgagggcttcatattaagctgaaattcatgtgagtttgtgcctagtaagtaaaactgacatactggagcactggcgtggtacttgtacatgtcaaatagtaactgttagctgatgcacacatgcagacccacacaagcacatacatgttagtgtgcatttttattgcaggctattaaaagcatttgttaactagaagggaccttagaaatgatatagtatggctccctcaggatgatgaaactcgagacctggagaaagggaagcaacttgccaggccacacagtgagtggtaaaccagggaccaaaatctggttctttgccccagctagagaaagtctgctggaccccaccctgcctctcttctaactactttacatcatgtgcaataacaatgacagtaagtaatatccacaccccgctgacagtctgcaaacgcctttctctttcatggcaagctgaattagaagctttggagtgtactgattttgccttctctgtctcaccaccttcctgccacctgtctttttgcattcctgatgaaaataaaacccaaatgcataaatcatatgactgatagtcataactggtttctttagattgctgtagctaagttatgcatgtatagattcactgaaaactttttttgacacctcataaaattagtatgtaaattgggggtaaaattgaatacccccaatttaaattgctgggcacagctctagttagataatatttggagacaaggcttggagacaagatgtagccagggtgaccagatgtcaggattgagaactctgtgagcttaggcaatgggttcaatgttttgaaattccttgttcccacaagcctcataaatactacctttgtgccttcttaaatacacagtgttttgcttagctgtttgcatcaggcatgtaacaggcggcaatatttagaaagttagagggcagcaccttccaaaatggacctggatttacctttttatcatgtttttctcctgctgaggagttcacattatcacttcatcattgattgtttttgtgtgaggtaatccatagagttttgcttgaaccccacaaattgaattaagagaactagctgctgttctcccttgctacagtgggtggctcccccaaaaatatcccacctcctaatcactagaacctataaatgtagcctttttcagaaaaagggtcattgcagctataataaatttaaggctcttcaaatgagattatcctggattacccaagtagacctgaaatccaatgacaagtgtccttacaagagacagaagaagacatggatacagagaagaggagaaggccatgggaagacggaggcagagactggagtgaggcaatcacaagccagttatgcctgggtcacctgaagctggaagaggagccttcggaaggagcctttggatggagcaaggcctggccaacaacttgatttctgatttctggcctccagaactgtgagagaatagatttccctcgtcttaagccaccaggtatgtggcaatttgttacgactgcctcagaaaactaatacacctgccagctgcaaggtggccctcctctgaatgcgaggtgttagaagggacagtgtctctcagagtcaattctgaaaaacactagttgtgtgggtgaagagataggcgggccttaaatggcagaaggagtgagtgagatgaaagtatggagaggccagacatgaaatcactaggcggattatttatgtatttttctgtacgggtgcatcacttctaaaagtattgtttgtttgcttgttttcacacacttgcttccatttattccctcttctcatgtacatggtggaagaacactcataattggccttttgtcttctaacctgtaacataagaacaacttgaacttcagaaccagccattttggcatgcagtattcctgaaattggttttagttatttcaattaggtatttaaattagcatttgtttctcttttaccattcattctcacacattggtcacatgaagtgttgatgttcttttaggtttgggaagttcacttgcagtagataaatcagtcacctaaaatgttactgtccaaaatcattggagcagttgataccgccagtatccatgactgactgcgttccttcatttggtctatggagatacttatcaagccctgtatgtgccagacactgtgtctggaatgaagtgaacagtggggcacagaacagatatggtttggcccttctggagctctaagcacagcagcacatcttctagatcttggctgactctggagttggtgttgcccaagatctcttcaggatctaactgagttggttttgtcttagactcttctctctcccaggctgaattagataaaccagactccaaaaggcagctggatgaggtcatctatgggtttctggggatgacgtgtttggcagaagtcccctctcctgtcattctccacctccacagacatttagaacagctctatccagctgcatatctagacagaacttgactcgacatccacagtatctgatttatactgaatttgccacagatacatagaatctgaagtttcccttctaaaggggtattttgagccataacaaattccatgaaaaacaactctatgtcctccctaagtgataacaatattaagagtggaaattgtcactcacaaagagcttgactaacaaattcccattctttcttacaggcaacttttgtctcctctccttcctctagccacagttaatgtttgctgagatgtaaattcaccctccactgctctaaatatattagaggtatcaattcatttgttcttcatacaaccagagataggtgctattattcccattttacaagtgaagaaactgaggtaaagttacttgcccaactttcaaggacattatgtatgagttgggactcaaattcagatagtttggctctagggtccacagtctttaccattatgctagactgccatcacagaatcagatcaacatgcattgttaatctatctgtgactgatgattgtttagccaatcagtaaccaaactgcaaagaaccagagttcttcgactacaggtactaatctctctactctgagccatgtaaaaaaataattgtagaagagagggaaattaaaaattaaagtgtgggggtattgcattgaagctgcacatttacgtgagttaagagtccctgatcacagagcaccctctccaaacaagcctcccatctcctgaaggatgagaccccactgactgacttcgaccacagaacatgcaacctttgaaacatttccagaaacaatacagtccttcataacagtgtaggaatgaagctatctaattccctgtatcagccatcagaggtacaagtgacatgaaagtttaactggaatctttttttttccttatgtctcaatgcatactttgcacttttaattcagtattgtgtcaagttcatacatctaattcatggaaactacttataaaatatgaagacacattagcaactaagatttggttaatacacatttcaaatgttgttggatttctttggagtacaacaatacctaaatgttgcattatttaaccaatgttggggtgtgggtttgtgcacatagggttcccagcaggtaatttatctagtgatcatgtcctgatgaacacaagggccctattgcaggcaaatcaaaagaggtaggactatgtcccaagtgttgcttctcttaccccaaggttgcccaatgcaatagttttcattctggtacatgcaaacatgtttcctctaaggtgcaatgccagaaacctagaggaaaatgtgtcttggttttatctgagaaaactggcaacaattcctttggaattgattccttttctttttattattttaaagagagaatagatggttattataccacttacgcagctaacagtttgtaggtcaagatgacctagagccaagaatgtgatattcattatgatacagcatgaaaaagagaaagttctgtttgtaaaggatttttttatgaagtcacaggcccaagggagatgagtacagaaagctatttagggtaccaagaataaattggatggccccctctctattcccttttttaatccccctaattatttattctgcaacttctcccccaacaagtatgtaagccacattagggccgggatttttgtttaatgtggcatccccagtgctggtatgtactctgtattaaaaatatattaatgaatgagtgaatgaatgaatgaatttcatctgaagaatgagccttccagacgaattccttgttaaaataagccagcacattgtctataaagcagcttccttgattaaggggcaaggtctcaggttaacgtgagataagagtttctgatttcagcatccagccaaatgatactgttctttggaacgcactctcttcttccctccactagtttttcttccctagcatttgttttggatctgtagttacagcattttctgctcagaattcaactgagggaaaaaaaaatgtgttttgagtaatactcactaaggtgaaaatctgaccatattttgagaaataaggggtttggaggctcaggacagaccatcccactgctgtcttagggacattgggctgctggagcctggcccaaagaaggtcttctgggaaatcaggactgagtctgggcaatgctagagtcagtgggtaaaatggctttggagtgtggcacacatagtaacgctctgtggaaccctccatattgacctgagcctggcctgatctatgagtcatctaaacctaacaaaaggcatctagaggacttggggttaaggccgagttattcttcaagtacacaattatggttgccagtaaaatgaatttcatgcttgaggtgatatttgtgggagaaaaaaaaaaggaagattaaaaaggctgtgtcaaaatagtgttttgattagaccagaagcatcattctagaaaatgcaaaatagtaggaacgcaataaaacaaacaaacagacaaaacccaaacaaacaaaaaatgctttgggcatgcctttcaggaatgaacgatgaaccaaagtcataaatcatccccctctattccctatttttcaggtgttatgtttctctattttgtagactttcatgttctacattgtgaaaaaataactaatgcacaatcccatatatttaagcttgtatgattactaatatttgtcatctttttaatttgtagaggatatttaatttactcttttctggaatatatgataatcctgtgctttactttctcatgaaggagagagagtaaaacaataagcaccttggtttaaaaagaactaattagcaagtttccctccggttctccaggcttatggcaaataactttcttcctgacaactgaatgttacatcccaacctccattagtcttaatagaagtcatgcattctctcccacttgctgtgatataagaataatttttcttctgagtagaataatggttgtgaagtcatttaggtagtcacagaaaaaaatagccttttattgttgttgttgggttttctttgattccgggaatgaggctaagagaaaccttgttccattttaccgtaaatactattaatccagagatgagtccttagcatacagaaatgattgatttgcatttaaatgagtgaatattcagagtttctagactcagataaaacatcaaaattatccagtgaccttggctaaattttagagttaactacttaggtggcctaaacaaaagcttgtattttcagcacacctaccatatgaaaaaaaagactaaaagctaccttccaccatcctgatgtaaattagacaccgaaagtatacactttacctccactattattgatttattcatttctgacctcgttcccaagacagctcactcatttcctccaccaggtccaggaccaatatcttactttaagtaaaaagttttcactcagaaaagtctggttgactattgtatttgacaaagtagaaaatagagttatggtgctgttttaaaagaactggggaggtctgattcccaatctgcataataaggctgtctttagcactgtgcattagcagcaagtaattacctccaactagaatgaaatgagggtcaagaatggttccaagtaatccagtggaagtgttacttgctttattgaacatgctaatacaaagctgtatttggaagagtcaaagaagaaaaaatgccccaaacccaaattgccttatgagctttttcacaagagcagtccagagtggtctgtacatgataaatttaagagttgcggttgtttagttttaccactttaaattaattcacctaagaatttaaatgattttgggcttctgcttttgtgtctaaatttaatgatgcattctgtgaatataaggataaacacacacagatttttatacatgtaactgacctattttcaaataggtgtgcctattcctgaataaatagattgatgtcctaccagattacaaattaagtagatacgatttatatggttttagtatgtgaaagtattagctgattctaatttcttcttgtgaaatactaagcgaatgaaacatacttattaaaactcaaactgttattgacttatagtcatccatagttctaatctgggtgggtgacaattcaaagtcataacaataatttttttattagcagcaaattagctttgagaacaaaaatgcaatcagctccagaattcatacatttttttctttcattagacattaaccaaccaaagtttagggtgaatatgttttatacatctaggtcaatgataatacaaagaatgctagcctaatagcaatatcttgagctttttaccccactaacatacagcagaaagcacgtagaaaataagctctttcaacgaaataagtaattagaaatgacggactgttcagatttaaatttgatgataattatttaaaaatgacagaagtattggaagtttatcattcaaaccaccttaaaagtttttcctagtatacactacaacaacaacaaaaggaacattacaaaaactaagactttgagaggccagacatggtggttcacacctgtaatcccagcactttgggagactgagcgggggaggattgcttgagctcagaagtttgagaccagccttggcaacatagagagaccccatctctaataaaaaattttacattagctaggtgtggtggcatgtgcccattgacccagctactcaggatgctgaggacactgagtggggaggattgcttgagcccaggagttcaaggctgcagtgagctatgatcacgccgctgtattctagcctcggtgacagagcttgaccttgtctcataaaaggaaaaataataataagacgttgggaaacttttaaagcagaagagaaaatgtgggcatatgtataacttcccctcaaatacctctatcctatgctgacacactcatattcctaagaaagatagccggagaggattgccagacaaatgcaaactttttttatcctgcagaagtttcctgtcctgcattcttgccttcttatcatcctcagatgagaggagcttaatacatcagaaaagtcaggatacagtaggctatgtttcagtaacaaataaaccccaaagagcgaattgtttaacacactaagtttattctacactcaaagtccaaaatgaatcagatggccctcttccatcttatagcctgcaaggttgctgtgtcaagaaagagagagctaaaagtttccatgaggcgtgtctataagggccaggtttagaagtgccttgtgaaaccccccacctttgcatgcatcagggcctagccatgtgatcccaacctaaggcaagggagattggggagtgggtggcccacaagaggatgtgaagtggatcttaccactgtctctgctgcgggagaccttctagctcccttaagctcatctggcttaacagccagctctgtcttctctcctcagggctgtgctgtgggccctctgattctctagaaccaacatcccttcagagaaagagaacgttcagtgaaagaggaagagagagagatggaatgacagcactagctctcatacaaagtcccaaaagcatggaattccagaatggaattcattctgcacatcattttcttcaagtggggagagagagagaggtatgggagtggggacagagagagagagagagagagagagagagagagagagagaactactgaaataagaatttacccttatatttggaataagtaagaatataaataagaatatccttctcactctactttccttcctcccacataactactcccaccatagtgaatatgatagagtgtatatctgatttctttactccaaaaagatatcaagaaccttaagctttctttctgagccactcctcactaagcttatcctcatttcttaaagtataactatagctgggccattttacattctactgaatattctgtgacactgtggtcatcagcatgaatgacactttggggactcatctaaccaatattttggatgtctcccaagtgccaagtcttgtactaactccatcctgaggctgtgcttctctcaaagagcttgtggtctagctggtgtcatccaaatactgacagatacattacaggaaacacagctactgttgcttgtaacccacaccctgaggtgtgctgccaggtatgtgctcagccacacatcacacacaaaaatgccttctgaggtaccagttgtgtactgctctagagtaatcacatccaagatgggatggcacatacattaaagaccaaagctttgctcttctcatgagtgttaagaactgggaattcgtttcttcccgaggccaattctcacagtcttgatctgtcagaacttactggggttgaggagaaagatgatgttctgaacatggcctgtttgggcctgtttggggctcagttttgccatcagagatgttccttgctggcagtggcactggcccacaatggatagagctggcgtgaggagtggaagctgtaaaccaggacaccagaagttgccctttttagacccagctcttccactaactcactctgtgaccttggaggtgtccttttggcctctctgagctccagttttcctcatgtgtaaaatcaaatgtttggactagacaagggctctttcagctgtgacaccctgttattctgggcatctgtgttcctgcctctgtaattgaggtcatcagtcctatgtcatactgggtctgcagggaggatgaattggagcagagtcaccaggttgatcaactcgagaggcatccctcccacagtgactcaccaggagaaaaaccattagacccatcacctctgggacttgttgacactgattttcgtttttttctataacttctaaatgctcacaaactgaagaaggcaataacccttttttagtcagtgcagctaccaaaatggaaagaaagtacctttgcacctgtcgctgagctagcctctccaaaatgtacttagcccattgctgaggaagtctgtgggtttagagagaggactttctagaagacagagccctgcctgtcactggaagcccagcttagcatgaggggacttgtcacacagtactgtggaattacacacctttagagctgccaataagttcagccttctcctcaccttcacacagatttcttcacacacattttgcacacagggaagtgaagcccagagaggttgattaagccaaggtcatgcacggtatgaaggactgagatgagaactggcatcttctgactcctgactgttaggccagtgctcttgcactctaccgtgctaaataattcatagacacatgaatctggtatcaagaacagtgacatgataatggtacagccaataatggtagttacatataccacatatttattttacatgtatataatatgtgtattatatgtaatatatattctttagtcccaacttataggtaagaaactgagacacgtagagatgaactaatttattcatttggtgacatacagctcagttgttccattgaagcaattttttaagtgcttgtcatgagcaggcattaaactagtcactatgatggaatttagagttaaattagagctctgccctcaaggagatgatagtaatgtataacctaagccaaagacatgggtaacagttatataagggagagatgggaccgatgtcagaagacagagctggctagatttggggaaactcaaagaaagggatgtatttttttttccagattgaatgggttagaggaggaaagacaagggtagaggtaactgaactgaatctccaaagaagtgtaggttgtagggcatagaatagggaatgaaaagccagaatgggccaaaaatatctgcatgaagccaaacagcacatcagttgacaagtttgttctttgacaagtgcgcagccacaaccaagggatagcaagtgtaaaatgcttagtagtaggtgaagacgaggaatgtgactaatctcacgaaccacctgtgataaagaaatctttgctttctgattttgttacaccaaaaaaaaaaatagaaaagccattagaaaacttgtaaacctggtatctaaactacaagcaaattgaaactgacccagctcactgttaagagtctctttgtgagggaaaccagagcattttcctgtaaagtcaacagggtttacagttgtaataggccattgattctgaatacacaaatctgaacaaaccacggatcaaatcagtctccctgaaagatggcagcttcaaaaggtaaaagccagatgcaacagagttaacctccatcaccactttaaagaggagcagagctgtgattgtctccactgaagaacaaaatgaagattgggtttaagccagtgttgtgctggtaaatatttgaacactgactgtttaaaaatgtgtgtgtgtcaaggacagaaaaccaaacaccgcacattctcactcataagtgggagttgagcaattagaacacatggacacagggagggaaacatcacacactggggcctgttttggatctgtagttattgggagggtcaggggagggatggcattaggagaaatacctaatgtagatgacaggttgttgggtgcagcaaaccaccgtggcacgtgtatacctatgtaacaaacctgcacatgtaccccagaacacaaagtataatagataatattttaatgaaatattaaaattaaactgccaagaatgtatatttaaaaaggtgtgtgtttaagcttattattaattttcccaataaagagcacataatttacaaataacaataaaatgttcagtattctttgttctaaattccatgtacccaatcgtttctttaagaatgtttttattgatttttgccaaattattgtatctatagctaacctatgggtgcaactgatgaatgaatatagtcccaaaataatatggttagtatttttggttaccttagtaggtaagaagaaggtgaaaccaaaaagacctgtgttggaacctcatttgctcctccataatattagtaacttccttactgaatcaaataacagttttcaaataatagaccaccactatttttccagttttgtgctgctcatgatgtaatgtctacaaacacagcacactttgaagtttaatatgtaatatttacattttctccatccatttctaataatcaacagtatagcaaatcaagtcctgattggtggtgtttgcttatttctatgatataatacttccttacagctggtttccagctcccaatgagatatcactgaatgcagagctggaaagagaggtaccgtagcaggccttatataacattttcactattatgcactgaatatgtgcgtgtatgtccccaagtctatatgttgaagccctgacccccaatgtgatggtatttggagaaggctcctttggtaggtaattagatttatgtaattaggtttagatgaggtcacaagtgtggggtccccatgatgagattagtgaccttataaaaagagaccggagtatcctataacactgtagttaaatatgaacagaattaacaataatacatagatttaaatagctagaatgaagatattgaatggtctcaacccaaagaaatgatcaatgtttgagatgatgggtatgccaattaccctgatctgatcactgtccatcatgtgtattgcaacatcactatgtaccccataaacatgtacaattattatgtgtcaattttttaaaactaaaaagtttaaaaaattaaaaataattgtagaaaataaaaacaccatggtcacaaaaaaataaaaattaaaaaagaaaccagagtttgcacttgtgcaccccctcgcctgccccatcaccataaaggaacaccctccctgtgcttcctctttctattgttaccacttactccccatcctctcacaactactaatctgttctccatctccatagttttatttccagaatgttataaatataaaattatacagtacattaacttttgagatgacttttttcactaagaataataccctagtttcgtctacatagttgcatgtatcatttcttttatttctgagtagtattccattgtgcagataaaccagaatttgtttaaccattcacccattgatagacatgtgggttgtttccagttctttgctgttatggatagagctgccatagacatttgtgtattttgtatatagattttatgcgaatataacttttcatttttctgggataagtgcctaaaactgattgctgggacctatgattggcgcaagaaacttccaaactattttccagagtgcctgtattattttcctttcccaccatcatgtatgagagatcaagcttctctgtattctcaccagcattttgtgttgtcactgttttccattttagcagttctaattgctatgtgctgatatctcattgtggttttaatttgcattctctaatggataacgacgttggacatctttttatgtgtttatttgccacctgtatcacctctttggggaaatgtttcctcatgtcttttacccattttctaattggagtttgtttctttactatacagttttaagagttctttatatattcgagatgtaagaaatttgtcagatatatggtttgcaagctttttctcccagtctgtaacttgtcttttcattctcttaaaagagtcttttgcagcataaaagtttcaaatgttgataaatcatatatcaatttttggtgtcatgtctaagaactctttacttagatttacatcctgaatattttcacttatttttaaataaaaagttttagaattttatattttcatttaaatccatgatccattatgaattaatttttcatgtggtgtgaggttttaaatcaaggttcatttttctgcccattggtgtccaattgttcccgtgttgtttgttcaaagttatcccttctccaatgaaatttttgtttttaatataattcatttcattataagttttaaaaataatgcttgtgcgtaacaactagctcacaaaaatttaacaatcagttctgggagccagcacagggtggctccagcactttattggtttaaactatattgtatgttattgattaggagggaaaaagtagtcatatggatggttagaaatgatgagtgtttacctaaatgcccatcagtgatagactggacaaaaaaaatgtggtacatatacaccatggaatactgtgcagccttaaaaaggagcgagattatgtcctttgcagggacatggatggagctggaagccataatccttagcaaactaatgcaggaacagaaaaccaaacacttcatgtcctcacttataagtgggagctgaattataagaacacatggacacatgtgggagaacaacccacactgaggcctgttggaaagtgggaggggagggagagtatcaggaagaatagctaattgatgctggacttaatgccaaggtgctgaaatgatctttgcagcaaaccaccatggcacacgtttacctgtgtaaaaagcctgcgcatcctgcacatgtaccccaagcttaaaatagatgttgagaggaaaaaaagaaagagtgagtgtttgtaaataaatacatatgtaaaacattataagaacataagggcccagaggtagcattagtatcattttgtagaaaattaaaactcaggtttgaaactcacattttactagcctcagagggaggaagcaggaatgggatgtaattcatgctattactttgaaattgcttaattaatagattattttcaaactaattgggtggccaggaagcttagtagaataatcatggcctctgtggtcaaatggagctgggtctgaaccttggctctgacatttaccagctttgaggaaatgccttattcactatcagtttcccttagtgttaaaatggagagaactccaagaatcaaaagctatattcattaatttaacaaatacttgatgagttctggtctatggagaagggattggggatacagcaatgagcaaaacagtcatgatttttgccctcaaagagtttacaatccagtgaagaggtggacagtgaacaaataagcacattagtgaaatggtattaccattgtgaaaagcggcatgaaggaaaaaaagcagatgtagtggtttaaacagacaaacccaaaacttagcacttttccaagcacacagagtttgctcagtggcagctattcatattactgcagattagggtacgattagtgtggtccaggcagaggtttggaggcctgtctggggacctgaccactgtcatctatgttgcatactgtaatgctcattttgcacatcaatctgaattggatgtgcttcaaggtcctcctcttactctaaaaatctgtgttccttaggtgtgtcaaacagggattagtttaatttcttacaaaaggtgagggtaaattcagcaatcagtatggtagtaattgactcagttgctatatgtgtttacattttaataatgtttttctgtgatattccccactcatgccttttttaacatagagtaaattatgaaaaaagacttagggagctagaatcctaggacaatgagatgactctgaaagtgtttacaaactttacttccaactactggcacacattgagttttgtttggaagtaggttattattaatcaatgtttttttgtaatgaagtccataaatccacattaaatacacatccagacttcttgaggtccttttgattttgcatattttcatcagaataattcactaaactcaatctgagtctttttcattttaagtttttgctgattttctactaagtgtcctctgacttattgagcaaccagtgcagcattggctgcctgggcagggaaggaaacagcaggggttatataggaatctgagtgattctgcttcttggctcttgttcttatggtttaaaatagaaggaataatcttttcaccactgtctccaccacctccagttttcagtgggaagatgaggagtaagaggtacatggttagttattttctgtttcccttctctaatttcttttattatcaaattggtactgccttattgtaggaaattgggaaaataaaaactaaaaaagggaaaataaaacttatctgtaatgttactgttaggagtcatcgtctcccatactttgaaaccggatatgataattccataatttcagggttagactctattaaagtctctacttatgcctctacagcactttaagaccaatagaggaagccatatacctaagtgaggcccaagatccagaaaaaaaaaaagaaaagaaagcataggtaagagccatataatgctgtgttacaggaactattctaaatacattgcaaatatgtttcttacaaccacactctattattaccctcatttttctatagtcacaaaagcagtaagaggtagaacctgaattcaggcccagtaagactggctccagagtccacaggctaacaaactttgtaatactacagaaagctgagtaaccatttccaacttccctcctcccctagctcattccctcctgtgggaagcctacactttcattgtttctttgtctcactcatggcccaatatttactttgttcctattttgacttgttgtgtgatgtctgtcactcctgtcagtggaggaactgttttgtcccattattctctttctagaactttccctccactcacttctactgaaggccagctgtatttccatgacctgccaatacaactcacaaccatctcctccaaaaatctggtagttttacacagtaaccaaagtcacatacaatctttagcatagatttggggaggagggagggaaatgattaagtgcggtgtttaacatggggttggggaggttttgtgaggtcactgagggtccgacgactccttcaaaccatcagggagataacctctattgattggtgtatttttcttgaatttttttctatgcatacacttttctaaagtttattttatttatttttattttacccaacttgtaattttgaaataactcaaacctggagaaaaatggaaagtattttaactgaagactttttacctttacctactatattagtttcctgggactgctataacaaattaccacagactgggtaacttaaaacaatataaatgtattgtctcacagttctggaggccagaaatcttaaatggaggtattggcagggccatgctccctctgaaggctccagggaaggatcctttccttttcctaccttctggtgattgccgacagtccttgggttccttggcttgtagaggcattcctcgaatctttgacatcacatggcacttggcctccttcctcatgggtctctctgtccctcctctcttcttataaggaatgcaattgtattggatttagggcccaccctaattcagtatgacctcatcataatttaattacatctgcaaaggtcctatttccaaataatgttacattctgcagttctgagaggacattaattttggtggatattatttagctcagtacacctgtagtcaccaattgttaacattttgacacattcgttttatttttaactccaactgtccacccacccacccacccatccatcctcacacacacagattttgttaatccatttgaaagtactagacatgacactacacccctaaatacttcagctgctggtatctattaggcaaaataacattttcgctacataaccacaatactactattatctcatatttaatatgaatcccataatatccgatatagagatcatattcatatttccccattttttctaaaaacattctttatagctgatggatttttcccccacaaatcaagattgaataaaggatcaaacattgcacttatttattatgtttctttaatctccttttagctagaaggatacctcgctttttttaatttttcatgatactcatatttttgaagagtccaagccagttgactttgagaatgtaccatattctgggtttgtctgatcatttcttcattattagatcagattaagcatttttgaaaagagttccccgcaggagacgctgtctactctggttgcctgacatcctgaggctcatgatgcccgtttgctctgctggtcatgatgccacatgtgacagctttgctggggtggcggcaaccgcttctctgcacagtcatgcacattgtttcccagtcttttcaactctcgcttcacatcgtctttttatttgtccttttttcttcagagcttttggatttctgattagaagtgtttagaaaatatctgtaagtgcttttttgtacacatttaactcagtccggcagtagtgttagttttcttccgctatgtagttgtttggaggaaaaaattttcacctgctgaaatgttttgactctcattttctaaagttttatattgactttgtggggatgtcatcactgtttcatgttttaattatcttgcgttttcctgtaccaacaaaaccagatgattctgtgtagacagcaataaggttttagagagacttaattgatttcttggatcaagaacactgtcttctgttgacacagtgaagttttttgttgttgtttttttgttttttaatagtagatggcacattttgtgtgatgggatgggggtggtagtgtgctgtctcttcttcctgaacaacccttaatttcatgatcatggtatctcccctgccaggtaagtatgtcatatggcctccttcctcattggtctctctgttttgaatgcttactttcttctgcttcaccatctaggctccaagggcacctcctctcccaaaaaagccatgcctggacctgcactctcaagcctcctccctttgtgccccagtagctctgatccaccaggtcattgacctttctctctttatcctctcaggtgtgacattttcttaccgggaatgattttatctgtgctcttccacttgctaggcctcactgcctcctcctctgcctcctcctctttgccaagcattcaccggctgactttcggctccagcaaggccttcagcgctggctctgcaggtgtcagatttttatttccccacctctgtgtaaattcagatttgtagcattctcagtctcttacttatgttgtagacaggggttatgggtggttttatttgctatccttgttcatctctgtaggtttcagagaacatgtgtggagagatccatatttaatgtctagaaactccaagcctgcatatatttattcttgctgctttgatgttttgatgtaaatacaattatatatttcacattttaaaattctgacatggtatagtataattgtatctatctttttctctctttttgtggtttgctttttacatttaactctttcattcttctggaattattctttgctttggcttgtttatctagaccttctgttcttgcctatgggcacaatagaacataaggaaacatggcctagtttgcttagcaatggacagatgcttagagaaatgaggggcaagctttggccttgtgcaaatgtggtggatgcttgctgaagcgcagagtggacaggaccagggatgatctgactgtgagtttcttaagaaagttgagtgttggtctcttggcacttgaggctctcatttctgcagagtttgtcaaggaccaacggcccatcaaatctggctgcttgtcagatgcttcagaacagctttatgtcttgtcacattcttagtcactggcttatgccccaaattctccactaacgtttcagcttctcatgagcagtgactacttccttgtctcagaggacatctagctggagccttgcccaaagtgggttctcagagacaattcagtcacctttgaaagcttctatcctgagatcacaaaaggggttacaacaaaagcagtgtattttcctttggagacggataagaaaagaaagacacctgagcgggagtgggtagaagaagtattatgcagcctctatgaggcctgaccctttgacagcctcaggtcctcttcattttcttcaataccccacttttaaatatacactatgttggtatattcaccagtagctatcagggaaaattcagccagatatcgggtgaaattcacccccgatatttcacgtagtttcttttctattttccctaagtgtcagtcggtctgagaaataaagggacagagtacaaaagagagaaattttaaagctgggtatccgggggagacatcacatgtcagcaggttccgtgatgccccccgagccataaaaccagcaagtttttattagtgattttcaaaaggggagggagtgtatgaatagggtgtgggttacagagatcacatgcttcacaaggtaatagaatatcacaaggcaaatggaggcagggcgagatcacaggaccacaggacggggcgaaattaaaattgctaatgaagttttgggcacgcattgtcattgataacatcttatcaggagccagggtttgagagcagacaactggtctgaccaaaatttattaggcaggaatttcctcgtcctaataagcctgggagcgatatgggagactggggcttatttcatccctacagcttcgaccataaaagatggccaacccccgaagcggccatttcagaggcctaccctcagggatgcattctctttctcagggatgttccttgctgagaaaaagaattcaacgatatttctcccatttgcttttgaaagaagagaaatatggctctgttccgcccggctcaccagcggtcagagtttaaggttacctctcttgttttctgaacgttgctgttatcctgttctttttcaagttgcccagatttcatattgttcaaacacgcatgctctacaaacaatttgtgcagttaacacaatcatcacagggtcctgaggcgacatacatccccctcatcttacgaagatgatgggattaagagattgaagtaaaggcaggcataggaaatcacaagggtattgattggggaagtgataagtgtccatgaaatcttcacaatttatgttcagagattgcagtagagacaggcataagaaattataaaagtattaatttggggaactaataaatgtccatgaaatcttcacaatccatgttcttctgccatggcttcagccggtccctccattcggggttcctgacttcctgcagaaagcagccacccagatcctgcccgaagttgcccataaagcacttttggagaggctagattatggatccaattaagaatccctgtactgcaaattctaaagttctggcctagagtcctgtgagctatcctgcttacaattgttactagcagcacacacatgtctctggaatgcgaagaagaaagaaaaaaagacaaggaacgtgaaaattgggtgatgtcagcctcccttggataaagcccatcaatggttttcattgtcttggggtgaggaacaaatccttgatagaactaatatgatcctccatgatctgcccatgccgccttctccagcatcatctgctactccaactcccttgctgcctgtgcaccagcccctggcctcatttcagtttctcaaacattctgagcttctttccaccagagggtgtttgcatatgccgttcccactcccttgaatgcagctactccctctttttccttagttaatgcttggatatctttcagatctcaggtcaaatttcacttcttcagaaagtcttccttgattgcccctgttaaacacacattcttgtagcaactggtatttccagggtatttcttgcagttgtaattttacatcttttgcagggtccttttactaataatgttcttctccctaccccaccaggctacaatttccatgaatgcagaaaaagagtttatttttgccaaccattgaaatccatgtgcttaaaataaagactggcccacagaagatgctgaataaaatgtttgtggtatgcatgaatgaagtgattaatgtaaagcaactggtgagggctaaatgtccaaagtgaaacaaacactgaacaatcatgtaggcagataaacagttggctgattttttttaagaagtgattctttggtaatctctgacaaagatgctgatacaactgaatatatacatagctgagagacagatggaataactaagatgaaagttgaggaagaagattgaacaaaacatgataaaaaattcagagctacttgctggttgtgtctgaaagtagtgttcatttctagtcatatcgctgccataaggagttgaaagacagtgaggagaaaagcctaagaagggcagcatggatgaccccagattaaatgtcaagccactcacagaaagtttagagacttacagtggaaagtcaaaaggacttgaaggagatgtaattacagattcaaagctcaatgactgtatgtgataatgtcacctgctttcattttaacagagacctatttacacaatgcagatcctaaagtgcagatttggaaaattccaagtaaatttatgaagggtttttcaatagcaacaaaagaacctaaaagcatagggtagtggaaggtattaaagttgctatgtgagaagaaacacttgaatctgtgaatgaattctctttcaccctcactctctgtctctgtctagtgcatgtgcacacacatttatattttaagaaaagtatttttagaaggaatctaacaaagagatggtgttaatttggatcttttaaaccaaaatactacatattcattttgcattttaatcagattttttcataatctgaaagaaacagatatatggctgctgttttccactcattagtatattctattgactccaaaactaaagggagatttataattctttactgtttaccaagagcattgaaggaaaaagctgaacattgactttttttatagagttgttatattatacttcatattggtatggagatggaattggcttctcaaagcatcattcttgaaatatatctcttcctccctatagaaaatttgtgcataggattaccagggacatttgtggaagatctggtgagaatagaaaaccagggaggtgggatgactaggaacagactgagctaaggcagggttaagtgagaccctgatagtaaagagagattgcctgttagctagaagttattgaaatacttatcacattaaagaatgtggctaaaggctcaaatagccatattttttccagctagaaaataaatcaaatttaacatgaccagcccacgctttattgataatagactaagatcacacagcgagtgctctggctaataggattgctgtgcagttacaaccattgctattacagcagatacagttctgcctgcaaaggcaccatggaattgtgcatgaccaaagacttgagttgtcctgaatgtctttgaccttgaaaagaggagataaatgggactgagcaacatggggactaaggaagacattcaggacagacctgaattgaagaatggggtgtccaaatcacaagcctggtctggtttaggtgaccatcatatacagaatggattgggagtcttaatttagtaggcaggtggagctgccagaagcactcaggctgcttctcaaaagcaggtgaatactttatgtcctcttttgtccatttccacctctacatttgtggtagacagaacaaaggtccacaaagatatccatgtcctaatccccagaacctttaaatgtgttaccttaccttaccaaataatttaccacgacttactaaaagggactttgcacatgtgattaaggttaggggccttgagatggggagataatcctgtattattccattgtgaacccaacctaatcatatgaatccataaaaggggagaaccttttcccactgaagttgaaatcaaaaagagatgtgcccccaggagaatggtaagagaaatgcaatgtttttgaagatagaggagggggccatgagccaaggaatgtgtgtggtctctagaaactaaataaagtgaggaaatggattattttttggagtcttcagaaaggaacacagccctgccaacactttgatcttagcccagtgaggcctgctttggacttgtaacctacagaactttaaaatagtaagttgtattgttttaagcccctgtatttgtggtaatttgtaacagcagctataaaaaaaaataaagtctcttaatccaagttgataacgccacttgtctgaagtacttactgcagtaatcttacggatttccctgcttccagttctgtccttccacaacccacaattgttcagagttgtcctcttgaaaaataccaggtcagtgatatttcgtggctcaaaactatccaatgaatccatggcccatagcatgaaacccagaattctaaatggccccttttcaacctcttatcacactactttctctctcatgggccccgaagttccccctcagagataaagtttctgatttttataattgcttgcttgatattttttcataacgtgactgcctaggtataatttgattttgtcagtttcttaaacattatataagtaggataatacagtaactattttttataattattatactttaagttctagggtacatgtgcacaatgtgcaggtttgttacacaggtatacatgtgccatgttggtttcctgcacccattaactcgtcatttacattaggtatttctcctaatgctatccctccccctgaccccaccccatgacaggcctcagggtgagatgttccccaccctgtgtctaagtgttctcattgttcaattcctacctatgaatgagaacatgtggtgtttggttttctgtccttgggatagtttgctcagaatgatggtttccagctgcatccatgtccctgcaaaggacatgaactcatccttttttatggctgcatagtattccatggtgtatatgtgccacattttcttaatccagtctatcattgatggaaatttgggttggttccaagtctttgctattgtgaatagtgccacaacaaacatacaagtgcatgtgtctttatagtagcatgatttataatcctttgggtatatacccagtaataggatggctgggtcaaatgataattctagttctagatccttgaggaattgccacactgtcttccgcaatggtggaattagtttaccaccccccccaccaacagtgtaaaagcattcctatttctccacatcctctccagcatctgttgtttcctgactttttgattatcgccattctaactagcgtgagacagtatctcattgtggttttgatttgcgtttctctgatgaccagtgatgatgagcattttttcatgtgtctgcgggtgcataaatgtcttcttttgagaagtgtctgttcatatcctttgccctctttttgatggggttgttttcttcttctaaatttgtttaagttctttgtagattctagatattagccctttatcagatgggtagattgcaaaaattttctcccattctctatatttcccattcactctgacagtagtttcttttgctgtgcagaagctctttagtttaattagatcccatttatccagtttggcttttgttgccattgcttttgatgttttagtcatgaagtccttgcccatgcctatgtcctgaaaggtattgcctaggttttcttctaggatttttatggttttaggtctaacatttaagtctttaatccatcttgaattaatttttgtataaggtgtaacgaagggatccaatttcagctttctacatatggctagctagttttcccagcaccatttattaaatagagaatcctttcccatttcttgcttttgtcaggtttgtcaaagatcagatggttgtagatgtgtggtgttatttctgaggcctctgttctgctccattggtctatatatctgttttggtaccagtgccatgctgttttggttactgtagccttgtagtagagtttgaagtcaggtagcgtgatgcctccagctttgttctttttgcttaggattgtcttggcaatgtgggctcctttttggatccatatgaactttagttgtttccaattctatgaaaaatgtcattggtagcttaatggggatggcattgaatctataaattaccttgggcaatatggccattttcaccatattgattcttcctattcatgagcatggaaggttcttccatttgtttgtgtcctcttttatttcgttgggaagtggtttgtagttctccttgaagaggtccttcacatcccttgtaagttggatttctaagtattttattctctttgtagcaattgtgaatgggagttcactgatgatttggctctctgtctgttattggtatttaggaatgcttgtgatttttgcacattgattttgtatcttgagactttgctgaaattgcttatcagcttaaggagattttgggctgagacgatggggttttctaaatataaaatcatgtcatctgcaaaaagggacaatttgacttcctcttttcctaattgaatacctttatttctttctcttgcctgattgccctggccagaacttccaacactatgttgaataggagtggtgagagagggcatccctgtcttgtgccagttttcaaagggaatgcttccagtttttgcccattcagtatgatgttggctgtgggtttgtcataaatagctcttattattttgagatacgttccatcaatacctagtttattgagagcttttagcatgaaggctgttgaattttatcaaaggccttttctgcatctattgagacaatcatgtggtttctgtcattggttctgtttatgtgatggattatatttattgatttgcatatgttgaaccagccttgcatcccagggatgaagctgacttgatcgtggtgcataagctttttgatgtgctgctggattcagattgccagtattttattgaggatttttgcatcaatgttcatcagcgatactggtctaaaattctctttttttgttgtgtcactgccagcctttggtatcaggatgatgctggcctcataaaatgagctagggaggattccctctttttctattgatcggaatactttcagaaggaatggtaccagctcctctttgtatctctggtacaattcggctgtgaatccgtgtggtcctggactttttttggttggaaggctgttaattattgcctcaatttcagagcctgttattggtctattcagagattcaacttcttcctggtttagtcttgggagggtgtatgtgtccaggaatttatccatttcttctatattttctagtttatttgcatagaggtgttcatagtattctttgtatttctgcgggatcagtggtgacatcccctttatcatttttattgcatctatttgattcttctctcttcttctttagcagtcttgctagcagtctatcaattttgttaatcttttcaaaaaatcagctcctgaattcattaattttttgaagggttttttgtgtctctatctctttcagtgctgctctgatcttagttatttcctgcattctgctagcttttgaatttgtttgctcttgcttcactggttcttctaattttgatgttagggtgtcaattttagatctttcctgctttcttgtgggcagttagtgctataaatttccctctacacactgctttaaatgtgtcccagagattctggtacattgtgtcttttttctcattggtttgaaagaacatctttatttctgccttcatttcattatttacccagtagtcattcaggagcaggttgttcagtttccatgtagttgtgcggttttgagtgaatttcttaatcctgagttctaatttggttgcagtgtggtctgagagacagtttgttgtgatttctgttcttttacatttgctgaggagtgctttacttccaactatgtggtcaagtttggaataagtgcgatgtggtgctgagaagaatgtatattctgttgatttggggtggagagttctgtagctgtctattaggtctgcttggtgcagagctgagttcaggtcctggatatccttgttaaccttctgtctcgttgatctgtctaatattgatagtggggtgttaaagtctcccattattattctgcgggagtctaagtccctttgtaggtctctaaggacttgctttatgaatctgggtgttcctgtattgggtgcatatatattaaggatagttagctcttcttgttgaattgatccctttgccattatgtaatggccttctttgtctcttttgatctttgttggtttaaagtctgttttatcagagactaggattgcaacccctgcttttttgccttccatttgcttggtagatcttcctccatccctttattttgagcctatgtgtgtctctgcacatgagatgggtctcctgaatagagcacactgatgggtcttgactccttatccaattttccagtctgtgccttttaattggggcatttagcccatttacagttaaggttagtattgttgtgtgttaatgtgatccagtcattatgatgttagctggttattttgcccattagttgatgcagtttcttcctagcattgatggcctttacaatttggcatgtttttgcagtgtctggtacaggttgttcctttccatgtttagtgcttccttcaggagatcttgtaaggcaggcctggtggtgacaaaatctctcagaatttgctgtctgtaaaggattttatttctccttcacttatgaagcttagtttggctggatatgaaattctgggttgaaaattcttttctttaagaatgttgaatattggcccccactctcttctggcttgtagagtttctgccaagaaatccactgttacactgatggtcttccctttgtgcgttacccaacttttctctctggttgcccttaacttttttcccttcatttcaaccttggagaatctgattcccttccaaaatggccaaataggaacagctccagtctgcagctcccagtgtgatcaacgcagaacacgcatgattactgcatttccaactgaggttcctggttcatcacactgggactgttggacagggggtgtagcccatggagggcaagccgaagcagggtggtgcattgtctgaaccaggaagtgcaagggttcaggggatttccctttcctaaccaagggaatccgtaccttcgccaaagactgtacctggaaaaacaggacactcctgcccaaatactgtgcttttccaatggtcttagcaaacggcacaccaggagattatatcccatgccgggttcagcaagtcccactcccatggagccttgctcactgctagtgcagcagtctgagatcaacctgcaaggcagtagcctgtcagggagaggggcatctgccattactgagccttcagtaggtaaacaaagcagcctggaagctcaaactgggcggagcctaccacagctcagcaaggctactgcctctgtagactccacctatgggggcagggcatagctgaacaaaaggcagcagaaacttctgcagacttaaacgtccctgtctgacagccctaaagagagcagtggttctcccagcatggtgtttgagctcagagaacagacagactgcctcctcaagtgggtccctgacccccgtgtagcctaactgggagagacctcccagtagtggccgactgacacctcatacaggcaggtgcccctctgggacgaagcttccagaggaaggattgggcagcaatatttgctgttctgcaatatttgctgttctgcagcctctgctggtaatacctaggcaaacagggtctggagtggaccaccagcaaactccaactgacctgcggatgactgttagaaggaaaatgaacaagcagaaaggaatagcatcaacatcaacaaaaaggacaaaaaaggacatccacaccaaaaccccatctgtatgtcaccaacatcaaagaccaaaggtagagaaaaccaaaaagatgaggagaaaccagagcagaaaagctgaaaactctgaaaaccagagtgcttcttcctcctccaaaggattgcagcccctcgccagcaacagaacaaagctggatggagaatgacttagaagagctgacagaaataggcttcagaaggtcggtaataacaaacttctctgagctaaaggaggatgttcgaatccatcacaagaaagctaaaaaccttggaaaaagattagatgaatggctaactcgaataaacagtgtagagaagaccttaaatgacctgatggagctgaaaaccatggcacgagaactacatgactcatgcacaagcttcaatagccgatccaatcaagcagaagaaaaggtatcagtgattgaagatcaatttaatgaaataaagcgagaagagaagtttagagaaaaaaagagtaaaaagaaatgaacaaagcctccaagaaatatgggactatgtgaaaagaccaaatctatgtgtgattggtgtacctgaaagtgacggggagaggggaaccaagttggaaaacactcttcaggatattatccaggagaacttccccaacctagaaaggcaggccaacattcaaattcaggaaatacagagaacaccacaaagatactcctcgagaagagcaatcccaagacacatacagtaactattttttttagtatgactttcactcaacagtatcattaagaatcatgtgttgcatgtagctggggtctgttcattttcattctaataactcacctttgaattctttttgatgtgttatgtaatttgtagcactacataatttgtagatgatgtgatttacagataattgcatcatatgtaaataagaaaatatttttttttccaaaaccacttttatttcttgttctttcttgattgcactgtaaatgacctcaattatgatagtgaattgaaatggtaacagccactgtttttatctcattctcaatttcagaaagaaatgtttcagaaggtcattattagggatgagctttattgaaagttactttttgttttgtttagatttgtagatagcattcctcagagtaaggaatttctctcctgtttgctaaatatttgcaaaattaaaaaattaaatgtttgctaaatagggtgatagacccgtgatgcgtcgtgatgtcttatttaaggggaatgcgtgggcaatcttagtttcatggccgtgaggtaggaaccagatgccggatacagttcagtatagctacccccaagtgttacgggcccagagcgaggagagtagcacacttgcgtgggatattgatttcacggaggatggtgagtgagaaaccactaaatatttgctaaatattttggcatggatgaatgttgaaatttatataatgatttttctatatttattaagatgattatatcacatgatttttctcttttaatgctatgatcttacaaaatggtttctgttctttccaattctatatttttccctgttttttgccttttgttcaattgattgcatagtttttattattccatttcgtccctctatgagtttataaatcatatactctttcagaatactcacattagtgtacagttgggcaaaatcatccaacacaaagcctgttttgtattgaataccgtactgaaagtgaaaaaaaggatagttctattggtaatcaaagtataatttccactgactcagtatcactttcacaccatcgtaaagtcaaaaaatcttaagttggagactgtctgtagacacattgttcaataaatatcagaaagtgtaaaacatcatacaatgaaaagtccttttcctgctttagacctgcattcatccagtttccatccctctcaacataatgtgttactttttaaagttttcatactgatctttcccgaaatatttcatgcatatgtaagtcaatataatcattttgtattagtctgttctcacactgctaataaataaatacccgagactgggtaacttataaaggaaagaggtttaagtgactcacagttccacatagctggggaggcctcacaatcatggtggaaggcgaaggaggagcaaagtcacatcttacatagcagcaggcaagaagagagcgtgtgcaggggaactcccctttaaaaccatcagctcttgtgagacttattcactatcatgagaacagcatgggaaagacctcaccctgtgattcaattgcctcccaccaggaccctcccatgacacgtgggaatgatgagatctacaattcaagttgagatttgtgtggggacacagccaaaccatttcaaatatgttactactcttccatttttaagtaagtgatacatactttacacatgattatgcatcttcctttttaccttatatatttaaaagcatttcatagctacacatagaaaaatctttattttttcaataatgtatacgtttgtcccatattatatattatacttaaatcagtcccttacttataacattttgtgttgtttctgatcctgtgtttttataaacctacaaacataatacagatgtcattttgcacatgagagttattatctgtagaataaatttctggaagtggagtgctgagtctacaagcaggtgcatctgtcatcttgatagataatgtcacttgccctccatatgggttataccattttgcactcccatcatcaataattgagtctgcttatttttacctatcctcacccacagtgcctaatacatttagatttttgtcactttgaaactaagaacaataattctgtgtaactttttttttgtaattatgagtgacagtgatcatattttcataagtttaagagagatgtgagattgttcatctcttttgcccatttttccattggtctgttggtccttattgatcaaaaaatgatcattctctagcaagggtattagtcaattgtctgaacaaatgtttttcctagttcatgaaatgtatttgaattttttgatgggtagggtttttctgctttgtgttatttgcttgcttctggttttgtttggtatatagacaatttttctttgtatatggtagaatttttcataattcctacagtgtttgtcagtgttcttcagacaaacagaaccaataagatatatataattatataaagaaacttatttaaaaggaatcagctcatacaattaaggagtttggaaaggccaaaacctgaaggatggcctggcaggtgagagacccatggaagagtggatgttgtagttccagtatgaagattgtctactggcagaatttcctcttactcaggaagcagtcaggtttattattattattattattattattattattcaggcaagtaattggcccatctaccttatgaaggttaatctgctttacttgaagtccactaacttaaatgataatctcatccaaaaacaccctcatggaaacatcaagaataatgtttgaccaaatatctgaggactgtgacccagtcaaattgacacataaaattaactatcacacaccctttatggcttctgaatttttgtgtcatttttggaagatccacccccactccaaagttataaaaaaatcccatttttatctctagtgcattatgatttcatttttaataggtatatcttaaattctcatgaaatgtttcttgtgtgtgtaaccagactcaattgtccaaatattgtggattcaatataatcatgatcatcttcttctgatttaagatgccaaccttttcctaaagtttcatgtgcatttagatatctttccaagttttatgttctgtttggattattagccttattatgaaacagaaccagactgctttaattattgaatatttatagaatattttaatttctgataaagttagtctttgctctcttatttggtttctttactattctagtatataagaataaaaaaacaactaattttattacactaaaatgccatgtgccatactggtgtttctattagattcaaattaaaattacaaattagtgaagattgacatcttttttaaatcttcatttctaaaaatgtagtatgtcttttcatttgttgaagtattcttttgcttttcacttttttttttttttttttttttagaaataaggcctcgctctgtctcccaggctggattgcaatggtgcaatcatagcgcctcaaactcctgggctcaaagtgatcctcctacctttgcctcccaagtaactaggattatagacatgcatcaccacactcagttgattttttaaatttttttgtagagaagaggtttctcttcccaggcaggtctcaaacacctggcctcacgcaattctcccaccttggtctcccaaagtgttgggttccaggcatgagctactgtgccaggcttcttttgtattctttagagctatttcagaagcttctttcttcttgatataagtctgtaaattttcttggtacatttttgcatagttattttattatttttgttgctgtcataagtgtgggtctggtgtgaaggttattgaattctgtatgttagtttataacctgatacatttctgcattttcatactgcttgcagtatgaaatataagataacagtcttataatttcttctcttttccaattttcatatctgtaagttttttctttctttcttttttttttttttttttttttttttgaggcagagttttgctcttgttgcctaagctggagtgcaataacgtgatctcagctcactgcagcaacttccgcctcccgggttcaagttattctcctgccttagcctcctgagtagctgggattacaggcatgcaccaccatgcccggctaattttttgtatttttagtagaaacggggtttcaccatgttagccaggctggttttgaactgctgacctcaggtgatctgcctgcctcagcctcccaaactgctgggattacaagcgtgagccaccgtgcccaggctttctcttaaaatttcatgagattctaagtctagtacgttattaaataataaagttaatacttaatatccttttcttatgaggatacttctagtatttctccattaattttaacactagctttgggatagaagtagatacattatcccatagttaagctactattcattgatgattattttcttgagtgtttataaagaatggatttggatcattcaaatgattttttgtatctatggagattattatattactttcccttactgaaataaaagttatatctatatatttcttgatattgaacaccacctttccatatctggagtaaactgcacttggtgagagtgatatttttaattcagcagggtgagaatgtttagtgaagcattatacgttcaaaaatttgaaataatctacaggttcattaacagataaattggagttactttaataggtggatatatgtaagtgggattaatattgtatgtgaatggagattaacagattataaacatatgtagcaaggtagataaatcttataactttgcatcctctgacccctcccaaaagaaaagcagacacaaaagaatatgtactgtgtgatatgatttgcataaagtttaaacatgagaaaatttaaatgatagtgtttaggaatgcgtattttaaggaaataattatcataaaagtcaaaatattagttacctttaaaaaacagagtgggactgggcacggtggatggctcacgcctataatcccagcactttgggaggctgagatgggcagattgcttgagctcaggagttccagaccagcctgggcaacatggtgaaaccccatctctactaaaaatacaaaacttagccgggcttggtggcacatgtctgtaatcccagctacttgggaggctgaggcacaagaatagcttgaaacccggaggtggagactgcagtgagttgagattgcaccacagcattccagcctgggcgacaaagcgagatccatctcaaaaaaataaaaaattaaaataaaaaaattaaagaagaaagacagagacagagacagaaagtgattgggcaaatgagggacttccagggtgctgatatgtttaaattcttgacctgggtagtatttgcaaaagtatgtgctttataataattcatggagttttacatttatatttaatgtatttttctccatatgtgcatattgcattatgaaaagaatttaaaaattatttgcttataatttatttaaaattttcacatcactattcaggagtgaagatgtctatagttttctcctgtttttattctttttttgaggtttgatatgttgattatataaaaagaacttgaagatttccattatttgtcttggctcagaaaatgttaaaaaatcactgtataattacccattctttaaagatttaataaaagttccctgtgccttcatctgagcttgttgtttttcttgttcattgaagagatagagattgtaaaatttggcccatttaggtttttgcaatactatgggtcacatttgataaattatgttttcttagaaaattgtctattttatctaggttttgtatatttgcatcaaaataaataaagtaatgctgtacgatcttttaatttcctctatttttatagtcccccctgagcccccatatcatttactggttgtgaatttgtaccttctcctgttcctccttgattaatgaaactaacagttttgggatttttttttaagaaccaacattagcctttctttataaatttatctgatgattcgtctaattcaatccttctcaaactttgatctctatacaaatcacctggagaccttgttaaaatactgattctgatttagtaggtctgagttggggcctgagattctgcatttgtagcatgttgccagtgatcccaacattgctggcccctactttgagtaataaggttctagcacatctatttattcttttatatgtttctatctatattaatctctttcttcacttatttttctaatttcctgaaagatatttaatacatttctttccactttatttttcattactaataagttttttatttatagttgacataataattgtatatatttatagagtgcagtgttatgttttaatgattgtataccttgtataatgatcaaatcaggttaattaccgtatttgttactttaaacatttatctctctttgtggaaatatcatacaaaatcttctctttttgctgtcttgaaatgtacacaacattgttatttattacagttgcctagctgtgttataggacaccagaactattcttcttgtctaactataactttgtacccactgaccaacctctccccgtcgtgctatcccctacacctaccttccccagcctctgataacctctactctctatttctatgaggtcaacttttttagagtacacaaatgagtgagatcatgcagtgtttgtccttctgtgcctggcttacttcacttaacataatgtcctctaggtttatgctgccacaaatgatagaatttcgttctgttttatgactaagtagcattccattgtaaactattccattctatacaccacattttctttatccattcatctatggataggcatttagattgattctatatctttgctattgtgaatagcactgcaataaaaacaggagggtagctatctctttgacacaaatgatttcatttcctttggatatatataataatggcattgctgtatcatatgatagttctatttttaattgtttgagaaacttctgcatccttttccataatggctatattaatttacattattaccaacaagtcataagagttctcctttctccacattctctccagcatttgttattttttatctttttgataacagccgttctgactagggtgaggtaatagctcatagtagttttgatttgcatttccctgattattagtgatattgaccattttttgtcatatacctgttgactatttgtatgtattcttttgagaaacatctcttcaagtctgttgcccattattaatcacattgtttgttattttgttattgcattgagttccttacatattctgcatattaaccccttgttagatgcatagttcacacatactttctcctattctgtaggttgttttttcactctgatttttttcctgtgctgtacagaagctctttagtttgatgtaatcccatttgtctatttttgcttttgttgtctgtgctgtagaaatactcgacaaaatactaagaaaccaatctcatcaacacattaaaaagatgattcaccatgatcaactgattcatcccagggatgcaaggatggttcaatatatggaagttagtaaatgtgatacatcacattaacataaccaagaataaaaactctatgatcattttaatagatgctgaaaaagcattcaataaaattcaacgtcctttaacgacaaaaactcttaacaaattgcatatcaaaggaacatgcttgaacacagtaaaggccacataggacaaattcatagctaacatcatactgaacagggaaaaattgaaatcttttcctctaagacttgaaacaagacaagaatgcccacttttaccacttacattaaacacagtactggaagttctaggcagagccattaggcaagagagagaaataatggacatccaaatctgaaaggaggaagccaaattgtccctggttgcagatgacatggtcatatttatagaaaactccaaagattgcaccaaaaaactgttagaactaataaataaatttagtaaatttacagaatacaaatcaacatataaaaattagtagtatttctataaaccaatagcaaactctctgaaaaagaaatcaagaaagcaatttcatttgcaatagctaaagaaaaaaacctaggaataaacttaactgaggaggtgaaagatccctatagtaaaaactataaaacatggatgaaagaaattgaataagacacaaaaaaaatggaaaggtaacatgtgattatggattggaagaattaatatttttaaaatgttcgtattacctaaagctagctgcagattcaatgcaatccctacgaaaataccaaagacattctttacagaaatggaaaaaaaaatcttaaattcatattgaaatgcagaagactctgaatactcaaagcaatctggagcaaaaaaataaataaataaagcaacaggtatcacactacctgattttaaaatacactacaaggctatagtaatcaaaacagcatggtactggcataaaaacagacatatagaataatgaaacagaatagagaacccagaaataaatctatgcatttacaaccaattgattttcacaaagatgccaataacatacattgggggaaagagcagcctcttcaataaatggtgctgggaaaagtgattatattcagaagaatgaaactagactcctacctctcacgatatgcaaaaatcaactcaaattaagactgtaatgtaagactgggcatggtagctcatgcctgtaattccagcattttgggaggccaaggcgggcagatcacctgagatcaagaattcgagaccagcctggccaacatggcaaaaccccgtctctactgaaaatacaaaaattatctgggtgtggtggcaggtgcctgtaatcccagctacttgggaggctgaggcatgataatcagaggcatgataatcacttgaatctgggaaactgaggttgcagtaagccaagcttaccccattgcactccagcctgggggatagagtgagactctgtctccaaaaaaagactgtaatgtaagacccaaaactatgaaactactagaagaaaacataagggatatgcttcacaaaattggactgagcaaggatctttttaataagacctaagaaggacagacagcataactattttatttattaataatttattaattaagattaattttaaaaattaacatgaaattaatgatttattaatatacatgtttctatgaatttccataagtcctgctttaatagtatgtagtaggttttgacctacatactgtggtatttttatgatttctttctctagatattttgatatttcaatatttgtaccctgtctgagctaagagttgtcataacagaaaactttttaacatttaggtgctattgaccattgttttctgaattttgttaatttctcattttttgcattgatgatactgtttctacttcttaaaatttgttgaagttttctttgaggcctagtgggtggttaatttctatgactgttacacataaaggtgtatacttcattatcaaggtatattttgaggcatatcaattagactatatctatgtcatttagcactatatattttgctacttagtacttctacaccttgactaatttttcctactggatgtgtcaaaaacagaaagaagaaaattaaagcctctttaaatgggggaaagaataggtttttcaacaaatgctacctggacaactgcatatccatatgaaaagaagggaatggaaccacctttccactccatacacaaaaattaactcataatgaatcaaagagctaaatgtaagaaatagcactatgaaattctcaaaagaaaatgtaggtataaatctttatgaccttgattaggtatggattcttagatgtgataccaaaaacacaagcaacataagaaaaaatagagaaagtggaaataatcaaaattaaaaacgtttttccttcaaaggataccatcaagaaaataaaaaaataacccaaggatttggagaaaattttaacaagtcatatatgtgataagggacttgtatttaaaataatatgtaatgaaaaaggggggcacattccaagatggccaaataggaacagcttcggtctgcatctcccagcgtgatcaacacagaagacaggtgatttctgcatttccaactgaggtacctggttcatctcactaggactgcttggacagagggtgcagcccagagagggcgagctgaagcagagcgggcatcgcctcaccagggaagcatgaggggtcgggggatttccctttcctagccaagggaagccgtgacagactacctggaaaaatggggcactcccacccaaatactgtgcttttcccaaggtcttagcaactggcagacaaggtgattctctcctgtgcctggctcgatgggtcccacacccatagagccttgctcactgctagcacagcagtctgagatcaatctgcaaggctgcagcgtggctgggggaggggcatccaacattgctgaggcttaagtaggtaaacaaagcagcctggaagctcaaactgggtggggcccaccacagcttgacaagacctactgcctctagactccacctctgtgggcagggcatagctgaataaaaggcagtagacaacttctgcagacttaaatgtccctgtctgacagctctgaagagagcagttgttctcccagcattgcatttgagctcgagaatggacagactgcctcctcaagtgggtccctgacccccttgtagcctaactgggagacacctcccagtaggggccaacagacacctcatataggtggctgcccttctgggacaaagcttccagaggaaggatcaggcagcaatatttgctgttctgcaatatttgctattctgcagcctacattggagatacccaggcaaacagggtctggagtggaactccagcaaactccaacagacctgcagctgagagacctgaccgttagaaggaaaactaatgagcagaaaggaatagcatcaacatcaacaaaaaggacatccacaccaaaaccccatccataggtaaccaacatcaaagaacaaaggtagataaaaccacaaagatggggagaaaccagagcagaaaagctgaaaattctgaaaatcagagcacctcttctcctccaaaggatcacagctcctcgccagcaatggaacaaagctggatggagaatgactttgatgagttgacagaagtagtcttcagaaggtcggtaataacaaacttctctgagctaaaggagtatgttcaaacccatcgcaaggaagctaaaaaccctgaaaaaagattagatgaatggctaactagaataaacagtaaagagaagaccttaaatgacctgatggagctgaaaaccatggcatgagaacttcgtgaagcatgcacaagcttcaatagctgaatcaatcaagtggaagaaagggtatcagtaactgaagatcaaattaatgaaataaagcaagaagacaaggttagagcaaaaagagtaaaaagaaatgaatgaaacctccaagaaatatgggactatgtgaaaagaccaaatctacatctgattggtgtacctgaaagtgatgggcggatgaagccaagttggaaaacactcttcaggatattatccaggagaacttccctaacctagcaaggcaggccaacattcaaattcgggaaatacagagaacaccacaaagatattccttaagaagagcaaccccaagacacataattgtcagattcaacaaggttgaaatgaaggaaaaagtataagggcagccagaaagaaaggtcgggttacccacaaagggaagcccatcagactaacagcagatctctcagcggaaagcctaaaagccagaagagagtgggggccaatattcaacattcttaaagagaagaaatttcaacccagatttcatatccagccaaacaaagcttcatacgtgaaggagaaataaaatcctttacaggcaagcaaatgctgagagattttgtcaccaccaggcctgctttacaagagctcctgaaggaggcactaaacatggaaaggaacaaccagtaccagccactgcaaaaatatgccaaattgtaaagaccatcgatgctaggaagaaactgcatcaattaacaggcaaaataaccagcaaacatcataatgacaggatcaaattcacacataacaataataactttaaatgtaaatgggctaaataccccaattaaaagacacagactggcaaattggataaagagtcaagacccatcagtgtgctgtattcaggagacccatctcacatgcaaagactcacatagactcaaaataaagggatggaggaagatctaccaagcaaatagaaagaaaaagaaaaagcaggggttgcaatcctagtctctgataaaacagactttaaaccaacaaagatcaaaggagacaaagaacaccattacataatggtaaagggatcaattcaaccagaagagctaactatcctaaatatatacgcacccaatacaagagcacccaggttcataaaacaagtccttagagatctacaaagagacttagactcccacacaataataatgggagattttaacaccccactgtcaatattagacagatcaacaagacaagttaacaaggatatccaggacctgaactcagctctgcaccaagcagacctaatagacagctgcagaactctccaccccaaatcaacaggatatacattcttctcagcaccacgtcgcacttattccaaaattgaccacatagttggaagtaaagcactcctcagcaaatgtaaaagaacagaaatcacaacaaactgtctctcagaccacactgcaatcaaattagaactcaggattaagaaactcactcaaaaccacacaactacatggaaactgaacaacctgctcctgaatgactactgggtaaataatgaaatgaaggcagaaataaagatgttctttcaaatcaatgagaacaaagacacaacgtgtcagaatctctgggacacatttaaagcagtgtgtagagggaaatttatagcactaactgcccacaagagaaagcaggaaagatctaaaattgacaccctaacatcaaaattagaagaactacagaagcaagagcaaacaaattaaaatgctagcagaaggcaagaaataactaagatcagagcagcactgaaagagatagagacacaaaaaacccttcaaaaaattaatgaattcaggagctggttttttgaaaagattaacaaaattgatagactgctagcaagactaataaagaagaaaaaagagaagaagactcaaatagatgcaataaaaaatgacaaagtggatatcaccatcgatcccacagaaatacaaactaccatcagagaatactataaacacctctacaaaaataaactggaaagtctagaagaaatggataaattcctggacacacacaccctcccaagactaaactaggaagaagttgaatctctgaatagaccaataacaggctctgaaattgaggcaataattaatagcctaccaaagaaaaaaattccaggaccagaaggattcacagccaaattctattagaggtacaaagaggagctgttaccattccttctgaaagtattctaatcaatagaaaaagagggaatcctccctaactcattttatgaggccaacatcatcctgataccaaaggctggcagagacacaacagaaaaagagaattttagatgaatattcccaatgaacatcaatgcaaatatcctcaataaaatactggcaaaccaaatacaacagcacatcaaaaagcttatgcactacgatcaagtcagcttcatccctagcatgcaaggctgtttcaacatacacaaatcaataaatgtaatccatcacataaacagaaccaatgacagaaaccacatgattatctcaacagatgcagaaaaggccttcggcaaaattcaacagctttcttgctaaaaacacgcaataaactaggtattgatggaacgtatctcaaaataataagaactatttatgacaaacccacacccaatatcatagtgaatgagcaaaaactggaagcattcgctttgaaaaccagcacaagaaaacgatgccctctcacaccactcctgtgcaacatattgttggaagttatggccaaggcaatcaggcaagagaaagaaagaaagggtattcaattaggaaaagaggaagtcaaattgtccctttttgaagatgacatgattgtatatttagaaaaccccatcatgtcagcccaaatctccttaagctgataagcaacttcagcaaaatctcaggatacaaaatcaagtgcaaaaattacaagcattcctatacactaacagacaaacagagagccaaatcatgagtgaactcccattcacaattgctacaaagagaataaaatacctagaaatccaacttacaagggatgtgaaggacctcctcaaggagaactacaaaccactgtacaacgaaagaaaagaggacacaaacaaatggaagaatattccatgctcatggataggaagaatcaatatcatgaaaatggccacactgcccagggtaatttatagattcaaggccatccccttaagctaccaatgaccttctttgcagaattggaaaactactttaaagttcatatgaagcaaaaaagagcccgcattgccaagtaaatcctaagcaaaaagaacaaagctggaggcatcatgctacctgacttcaaactatactacaaggctacagtaaccaaaacagcatgatactggtaccaaaacagatatatagaccaatggaacagaacagaggcctcagaaataacaccacacatctacaatcatctgatctttgacaaacctgacaaaaacaagaaatggggaaagaattccctatttaataaatggtgttgggaaaactggctagccatatgtagaaagctgaaattggatcccttccttataccttatacaaaaattaattcaagatggattaaagacttaaatgttagacctaaaaccataaaaaccctagaagaaaacctaggcgatacctttcaggacataggcatgggcaaggacttcatgactaaaacaccaaaagtgatggtaacaaaagccaaaagccaaaatagacaaatgggatctaattaaactaaagagcttccgcacagcaaaagaaactatcatcagagtgagcagacaacctaaagagtgggagaaaatttttgcaatctacacatttgacaaagggctaatttccagaatctacaaagaacttaaacaaatttacaagaagaaaacaaacaaccccatcaaaaagtgtgcaaagatatgaacagacacttctcaaaagaagacatctatgcagccaacagacacatgaaaaaatgctcatcatcactggttattagagaaatgcaaatcaaaaccaccatgagataccatctcaccccagttagaatggcaatcattaaaaagtcaggaaacaatagatgctagaggatgtggagaaataggaacacttttacactgttggtgggagtgtaaattagttcaaccattgtggaagacagtgtggtgattcctcaaggatctagaactagaattaccatttgacccagcaatcccattactgggtatatacccaaaggattataaatcatgctactataaagacacatgcacacgtatgtttattgtggcactattcacaatatcaatgacttggaaccaatccaaatgtccatcagtgatagactagattaagaaaatgtggcacatatacaccatggaatactctgcagccataaaaaaataaaggatgagttcatgtcctttgtagggacatggatgtgactggaaaccatcattctgagcaaactatcccaaggacagaaatccaaacaccacatgttctcactcataggtgggaattgaacaatgagatcagttggacacagggcaagggaacatcacacactggggcctgttgtggagtgggggactgggggagggatagcattaggagaaatatctaatgtaaatgatgagttgatgggtgcagcaaaccaacatggcatgtgtatacctatgtatcaaacctgcaccttgtgcacatgtaccctagaacttaaagtataataataaaagcaaataaacaaataaacaaaatcaataataagaaaatttttaaaaagtagctattacaattcaataatacaaagacaaataactcaattttaaaatgagcaaaggatttcaaccaacatttctccaaagaagatataaaatgttagccaaacacacgagaagattttcagcgtcattcatcattagggaaatgcaaatccaaatcacagtgagatatcatttgacaccagttaggttggctatattcaaaaagacaaaaaataacaagtgttggcaaggatgtgggaaaattggaaccctcatacgttgctggtcagaatgcaaaatgttgcaacctctttgaaaagcagcctggctgtttctcaaacgattaagaatagagttaccatgtggtccaacaattctaccacttgatatctacccaagagaaatgaaaacatgtccacacaaaagcttttgtatgaatgttcatagcagcaccagacacaacagcccaacagtggaaaaaacccaaatgtccataaattgatgaatagattaataaaatgtagtaacccatataatggaatattcatcagcaataaaaataaatgaagtacttgatgcttttgcctcacaactcttaagattctttcctttgtcctgactttagataatctgatgactatgtgcctaggtgatgatctttttgcgaagaacttcccagtgttcttagagcttgttgtatgtggacgtctagatctctagtaaagccaaggaagttttcttcgattagtccctcaaatatgttttccaaacttttagatttctcttcttccttagaaacaccaattattcttaggtttggatgtttaatatagtcccaaacttcttggaagcctttttcattaaaaaaatttttttttctttgtctttgacagattgggttaatttgaaagctttgtcatcaagctctgagattctttcttctgcttctttgattctattgctgagactttcctgtgcattttgcatttctttaagtgtgcccttgatttccagaagttgtgactggtttttatttatgctatctacttcactgaaaatttttcctttcatatcctgtatcacgtttttgattctgtcactatcttctgtgtccttgccaatattttaattaaattattcactctatggtcagttatcttcactttgttttctctgtgaagttatatttttgtgctcttattagagcatttatatttttattatattagttatctttatagttataaattgatcttagtcctctggtgtttgtttattcttactagttataactgtgaatattattatatttcttccttttctctccttttatctctggatccagcagcatactgattttagtcaataatttcttttctggtgtttgctttgatataactgtgtttctgatttatgacttgatttgccaactttaaatgaaatcctttgacttccagctgttttaaattaaacagtaaacacattttctcatcatttcaatttctttccctcttctcctctcaatgtttcagttatgttttatctgccactctaactcacatttttctagttttagtggtactgttaaatatatagtctccctcaatcttttccccaaacttattgattgactgaattttctcttttattggttcccacaaaaagacatcaacaaaataatattgctccagtttttgaactcttattaaaactattgtttgtagcccttatacttcaagaagagtttgcatatatattcttatctcaaagtctctttgcttgagaatctcatgggattgtatctggtattcagagttgctgtgtaaaaacaggaaggcagcctgaattcttctttcttgtaaaattgacctagtcttttcacctgtctgccgaaaggattctttatctttgaagcccagcaactttattgggatatgtctcattggtcattctgggtctttctttatttcttctattctatcacaccaactttgccattctcaacctctgtgaatctcctgtgatttttatactatctgattcttttgccccattttgtttttatttccttaattcttctattttttttttcttggactacacctttccttagttgtgcaagctcatatcttatctcttcctgctatgctaccatactttccctgaattattccattactgtgttatatatcatctttcatccaggtgatcactttaatttgaaggattttttttcctccaaattcatggcaagacatttgttcataactttcattggtatggtaatattttacagaaggatatactttattaatacattttttgccttttttcccttttgtcttggagtatagatataatttttattattcatctttgaatggttttcattttcctaagctctgtatttataagggctttcttgaggcaggaccaggtcagctttcctgtctagcatgcttgcccagtgcaaaggttcttcttttccacagtctccacaaaggtagaacgcttctcaaaaaaatgtgccttgtctttccaaatctttatttggccttgcttcttcttttttatgaaattcattatagtcccattagggtagaaggtcacatcctgcttctgccacacctttgccagcaaggggtacagcttctgactctcaagacatacccatcacttgcgggaaggaaattgttagtagtgtgttctgagatctgtcatggctggtctcctacaactgaggtcttgagatctgtctttagcctttcccaaattcttcccagaagaattcagttgcttttagaaaatcttaaaagtattttaagatttaggataaatacttaaaagtatttaaactctctcctgaagtttatttaacaactgagtttttgttctgagttttccattctttatttgccttagggtggttccagggagagaagtttggagaaggctgcatgacgcagccatgagtatacactgggagtttccactccatccccaatctccaccaaaaagacggtgcttctgaaggtatttttttccttctaatgccttagtttctttatacagtggccaaaaatagtacaagaatatcttcatggcaactacaggcattgctcattgtatggcaagctgatttatggaacttttccactacagaattgatggttctgagcatgaactcaaacagcagttacctgaaaatccagacacatgaggtcttatcccccaatctgtcagttctgtcagggtgaaatgtgcgccttctcagccttctgtcttctttggtgctcattgctaaatagttcagtagaaatgcctcagaggaatcatcttggtgctggctccaaggctctgtgcagtcagccaggctatgaaagaaggcagcctgtgccttctccagactcattcctgctccatcctcaacctaatcttcctgaatacactctccattcaagagccgatggaaaaatggatcactgacaaataacgaattattgtatgaattaacctcttgctggcaactgggcagtttgatagcagactcaaactgggtgatttgagaatttaataaagggactactaattcatcctatgctaatatgaaccctcatttagggttgagagagagtagccaagggatagtgcagtagttggggatttattaatggcagagagcctttaccatttcttgacctggaggggctaaatggcacaggaaacacccaagagtattgcatagctagggcttctggaaaggagcttcagccttcagtagtgggctataggctgtagaaggagggaagtagggaaaagaatctcaccctctctgtgtcaccttctcagctcctgccagtgcttctcattggccaaaccaaatcaacagccagatagcaaatggagttacttgattaagtcctcctatgatggggggaagacagtggatatggaggggcagaaagaaaataaacaaccctacagggatccaccaattgcttttattcagaataaaattttattcagaataaaatttcaaagctattttattctgtaccaaacattgcaaatgttggcttgcggaaagcaaatacaagattattctaaagaaaacattaagcctgaggccatatatcaattacaaggtgaattttagggctcaacacagttatatatcatcaagttcaaatgaacaaatgcctggatttgaatgctaaggcataggattatttcaatatgcacactctgagcattttctgaaaatcatcaagcttttattaccattttatcctaaatcccctgaccacttctcattcaatttgcatgaacaggcctcctctttccacccttattttaatcctggagtttcctaactcagccttctcctctgctaattctactccttctcatagacaggtaactttttctattctttgacatcagtttccacatcttctctagtgagatttcatactatttctttagctcagccctcccttatgaattctcagcccacagaacatagctgccaactggacattttcacctggatgctttatagacatcttaaatcatgttgaaaaactaactcattatcttaagcattcccaaacaaccttctaactcacgcgtgtgcgcacacacacacacacacacacacacagacaccctgcctattcctgaattctcaaacttttaaaatatttcatggccttcatttttgttttctaacaaaaatagataaatgtatgaatggaatgtttttttggcagagaaataagtaaatatttttaaaatttcttcagtgttttctacaatgaaaaggaaatcaacaatttctatactctacgtaggggtcagcttcccaaacccatgacccattagtaatcatcaacaccttatccctggtctcccatatcccggtggttataaattcatggttaaggcacatagctcatgtcttccctgcttggaactgtatgcccatgtctggcattaaaacagctatttcttgaatgagtaactctatgtcttttagctctatgctctaactatctccactgccagccctgcttcatctgattttagtcaataatttcttttctggtgtttgctttgaggacctatgtcaagatctgctgccaccaccttcacataggttctcagtgtcttcctcctatagcaccaaagggccttccagaggccttcctgcctccaaatattccctctctaatcctttctcttcactgcagccaattacctttctaaagggcaattgtggtccctctttaatttaattttattttatttgagaccggttctggctctgtcacccagtttggagttcgatggtgcaatctcagctcactgcaacctctgcctcccaggctcaagctgtcctgccacctcagcctcccaggtaactgggactataggtgcatgccaccatgcccagctaatttttctatttctttgtagagatgaattttcaccatgttgccaggctggtctcaaactcctgagctcaagttatctgcccacctcggccttccaaagtgctggtattacaggcatgagccactgagcccataaataataataagaaaactcactacttctgccttgctggctgggccacagacgattcctgtgtatttcccaaaacagtatgcacacacttgcatttgcaggttagagacaaagtatgtccactctaggttcttgctgcccttgagctaccttccagtttgctacctcctatctacaggactaagacccaagttcttagcatggaaatcagttttccttttcagcctcatttcctgccttacccatccactcacttagaacttggattcttcaacctcttacagtcccctaaaatgttttctgtgtgccatgccccttttgccttccccaggagttcctatttatgcttcaagaagcatctcaaatatcactccctccatgatgcctttgcgaactctctagcattagctgctccttcctctgatgttgtcctattttgtctatctctgtgttgtgcaataattacatctttacatttctgttggcccagcacaagccctacaggccagggctgtattgtagttttctttgtcatcctacccatcagtgccaaatttggaaaatagcaagaactcaatcaatagatgctaaactaatgaacactttattagcctacatttatggagcattcttggtacccattaaacagtttcatctctctcatatgtcagtgttatgtttcactgcagctttccctaaggaattttgtgagaaatatggagtattgcagcactattctttggtcacatgggggtttaattcctatttatacttttcttgtattactagaaataatgactgtaactacttatctggcaaatctctgaaatttctttttaaggaaattgttattgttggagaaatttgcaaagcccgactctgccagggctctattcctcatatctaagcagttaattctctactacgttacgtttagctttcggctctggaaacactctttgaatgcctcctttgtgcagatttatccaactctctcctctttctttcattaagcttgccctgtaaagccatattccttctgttttcaattgtgaatttatttcctctggagctttctgacttagaatctatttgaacttctatagaaactttggttgaaaaggaaaaaaagaaaaaaaagggcctatttttaaaggttttctctttcacctaatattagaggggatttctttgtgattaaacaaatttgttataaagtaacacacactgtgaaatatccaaacaactacaatgtcattataaatatatttttcttatcagagaaggcaacaggcaaatcagccactcttgcaaggtcatatttcacagagacagctgaattcacccactgttgaattatgttataaagccagtgatttagtattgtcatctattttgattgacaccaaaagccttccaggacagtaaatgtaaagatgttagaagaaaatcacttacaaaatggcttgatagttcatgttaatgagttttaaaatgcggtataacaacttaatcaaatcagacagctccataaaagaattaatttggtcattggctctctttccaaaatgactttgttgtactgagtaaggtgagaatttttctgtggctgaaacattcacaactagattcgaaatgacatagcctgggataagttatggattaaccaaagtttctcaggagttatttatatttggcctcttgttaaatgagatgcatgtcttttctgaagtttcattttaatgaaagagaaagaagaatatgaatgacatgtattaaagaccccgagcccacacttaaaacctcaattttggataacttgtgtgttaccttttagaaattagagtgtcattgggttgctattatgggtcgccaacagaaggggattcaggaatatctccatactgccccagaccacagcaataattttctgcaatgtcaagagaaaaacacaggacaataaccagttgaaagcagcaaagttctgcattattttttgctgtcctcttgtcccaaactctagaggagattattagaaacgtagtatctgcccctgtagaattatgggcttatgacaagactagagacctaaggagactagtttcttgtctatccgggctcaaacaccaacctctttcatgcacttccagactgaagttgtttctaaggtcagctttaaggagaaaattacatataatcagaattaccctccagaattcataaatcaccttccattggtatagatcactgtctcttggattgagcagcagattaagtagtcagattgcatttaggtttacattatataaaatttaatatgttttggctgggcgcagtggctcacacctgtaatcccagcactttaggaagccaaggtgggaggatggatagaggtcaggagttcaagaccagcttgggcaacatagcaagacctcatctctataaaaactttaagaattagctggacacagtggcacatgcctgtagtcccagatacttgggaggctggggcagaaggatcatttgagcccaggagtttgaggctgcagtgagctatgatcatgacactgcactccagtctgggtgacagaatgagaccgtgtctctttaaatattaggaatcaccttcagaatggcattgaaaggcaggaagtctgccaggcagtgcgtgagggaagagcagagtcatagactctcctcagactatcttattgacggacaagttacaggtacttttaaaatcagtctctccttcctctctctctctccttttctcagctttctgtctctctcctagagttaaattttaatgaaaaaaaataatgtgaattatttgtgtgttatatatgtgtaacatttctatgtatttatattattaatatgacataataatataatatttgtattattaatatttatttaaaaccatcagcacacacttagaacctccgttttgggtaatgtagttattaccaacattcctacctgacatttatttgtgtatttgttcagtgtatatctgtgtcttctgtgagactgtggggtttatgaagaaagggactatgtatcttttggctcaccatttcattcccacgactagcatggagccgaagaggagatgaaaacatttttatcaaatgaatggctaaaggagagagaccattagacattactacctttggaagttctcttagtaactgtggctcaatcatgttgcagtgttatagacacctttataatttacaaagaactttcacaaacatggcctcattataaaggtgacaagcatgattgtcccccataccagtctgtagaagaagaaactgagacttggagaggctaaccaacttgtgcaaagttgcacagctaacttatgacagaactaggtcttgaacccctgtcttctaacccttagccagaccagttggagttccccatccccagtgacctctcctacatttatggggactcttgtgtatcagagtttgtgactctgtgcccgtgtaaggcagtgatcacatcttgtccctcacaacagagatgtattaagtgcctactatgcgccagacatgcaaaaaacttccaggacgcaaacaagaatgagatgtatgtatttcttgccatcaaaacaactcacaatctaatgcagcatagtgttaaacatgtacatttctaatatactgttgaatatgtttgtggatgaaatcctatcctgcttgcagttgcaataatctgcaggttaaatggaaggaaaagcaaggcttgctggtttgcacaaacgttaacaactattagctcaagttcgaaacaagattgtaaccattctgcacaagtgttaaggagtgcatatttgcagagctgaggccaggaggcttaaattttagaaacagctgtggaactcctttcagtatgtacagttggaaggaggctggcattgtcagggagtcgctctggaaaatacaggcactgaatatattttatcttttcccttattccagtgttagtgtccccatagaattccaagtgagaaaataacctgcaaaggtgtgaggtgggaatcatattacaacattcaagcaggtgagatcctcagagatgaaaggggaagaaaatggcactttaatgcatgagagtaatcttccaggatttgtaccaggatgtgttatattttaacaagaagagttctcagaagggtcagtttcaggaacatcacatgaacccctggagaaaagtaaatggttgattggctgtcacacttactgtttcaatatgctgggtaaagcaaagcgaggaaaggtgaggtctcaccaagtgcagattacaaaacaaatgcattctttgtgtgcttttttcatagtagatgattttgaaacaaaaagagaaaaataaacctgttgagtagaaacttgggaagtaaaactgagtgatagaggattagttttcacatgtaggcggtacacagagtttgtacagtttcgtagttacaagacagggtagaatgaatatttaaagagaagactgttaggaacaatggttcagaaggatgaaggaactcaataaggttgtgagggattgagaaggaatgttttgcttgaaacatggagtatggcaacaatgaatgagcctagttttgaatcaaaatgacctgaaaaacttctgtagaaagtttccaacaaagcagtgctgtattatggaagatcctgccatatggattgaaacttttctagaacttttaatagacgagccctcataagtaagatccaggcaaccaaattactactctttgaatgctattgtgggtatcatgtcaagatccaatgttttctttccatgttatactaaagaaataaaacttaatgtctatagttcaggttatatttgaaactttaatagttctagattgaagctagcataaaaacactgtatactgagcatggtggctcacacctgtaatctcaatgctttgagaggccaaggccagaggatcacttgaggccaggagttcaagaccaacctgagcaacatagcgagaccccatctgatatggtttggctctgtgttcccacccaaatctcacctcaaattgtaataattcccatgtgttaagagcgagaccaggtggagataattgaatcatggtggcagtttcctctatgctgttctcatgatagtgacttctcatgagatctgatggttttataaggggcttcccccttttctcagcactcatcctccctcctgctgccctgcgaagaggtgctttctgccatgattgtcagtttcctgaggccttcacagctatgcggaactacgagtcaattaaacctcttttctttataaattacccagtcttgggtatttcttcatagcagcatgaaaacagactaatacagtaaattggtaccaggagtagtggatcactgctgaaaacatacccaaaaaatgaaaataaaaaattagccagacatgatggcatgctcctgaggtctagctattcaggaggctaaggcaggaggatcgcttgagcccagaagtttgaggttacagtgagctatgattgtgccactgcactgtagcctgggtgacagggtgagactttgtctctaaaaaagtgaaattaaaaaaaagaaagactccataaatgacattttaaagggaaaaaatgtttatgacaattatattgtatattcaaacaaaatgtattcttatttcataaccaatgaaaatctgtgttgactggaaaagagattaattatggtcactgagaagcagaatgtaaagcattatttgcaggaaaagaaagcctagtttcctttacatgccactcacatattggtattttctcattattagaacttacatttttttaagttcagagttttaaaattccccagagacttctgcaaaacctgaaccatcattgagtaatccatcaaaaatccagaggcattaaaagttccatgactaatatgtgtgaaatgtttgaagatgaaactctcttttgtaattatagaccgcagaatgtggaatagtttctgccgtttgaattacctacctgaggatactacttgaaagttccatcttccgtaaataacagccagcctgttatagaagacaggcagtgttttcatacctggaatagaaattattttagaatcatttccatgcaacattttttcattattactaagatctggtgactatgaaagggagtaaacttacacagctggctcttttcagacagagagattcaatttattcttgttccaatactgtaggaaaataaaaaggttaaaattaccttttggattcaatgtgatattttccctagatacctaaacaaatggaagacaggcagctttcccagctttggaataggggacagtaagggatttcccttgtagcgtgttgtgttttatctgaaatctggcccttttctgtaattaaaaaagggatttaggtactgaatttaatcctttaaatggccaatatcttgtaacttttccagatatttccctggttcatcaagaggcaagagacttactttaattctgatctaatatgtacctgccttttaattatgtgctaaaacaatttgggagatgggatggtttggtacaaacttgctcctgctgtggaaatggtgacttggttgatctaggttctggtccagaaatgtgcaggtttgggtttgttttttttttttcaattattatactttaagttttagggtacatgtgcacattgtgcaggttagttacatatgtatacatgtgccatgctggtgcgctgcacccactaactcatcatctagcattaggtatatctcccaatgctatccctcccccctgcccccaccccaccacagtccccagagtgtgatattccccttcctgtgtccatgtgatctcattgttcaattcccacctatgagtgagaatatgcagtgtttggttttttgttcttgcgatagtttactgagaatgatgatttccaatttcatccatgtccctacaaaggacatgaactcatcactttttatggctgcatagtattccatgctatatatgtgccacatttacttaatccagtctatcattgttggacatttgggttggttccaagtctttgctattgtgaataatgccgcaataaacatacgtgtgcatgtgtctttatagcagcatgatttatagtcctttgggtatatacccagtaatgggatggctgggtcaaatggtatttctagttctagatccctgaggaatcgccacactgacttccacaatggttgaactagtttacagtcccaccaacagtgtaaaagtgttcctatttctccacatcctctccagcacctgttgtttcctgactttttaatgattgccattctaactggtgtgagatggtatctcactgtggttttgatttgcatttctctgatggccagtgatgatgagcattttttcatgtgttttttggctgcataaatgtcttcttttgagaagtgtctgttcatgtcctttgcccacttttcgatggggttgtttatttttttcttgtaaatttgtttgagttcattgtagattctggatattagccctttgtcagatgagtaggttgcgaaaattttctcccattttgtaggttgcctgttcactctgatggtagtttcttttgctgtgcagaagctctttagtttaattagatcccatttgtcaattttgtcttttgttgccattgcttttggtgttttggacatgaagtccttgcccatgcctatgtcctgaatggtaatgcctaggttttcttctagggtttttatggttttaggtctaacgtttaagtccttaatccatcttgaattgatttttgtataaggtgtaaggaagggatccagtttcagctttgtacatatggctagccagttttcccagcaccatttattaaatagggaatcctttccccattgcttgtttttctcaggtttgtcaaagatcagatagttgtagatatgcggcgttatttctgagggctccgttttgttccattgatctatatctctgttttggtaccagtaccatgctgttttggttactgtagccttgtaatatagtttgaagtcaggtagcgtgatgcctccagctttgttcttttggcttaggattgccttggcgatgcgggctcttttttggttccatatgaactttaaagtagttttttccaattctgtgaagaaagtcattggtagcttgatggggatggcattgaatctgtacgttaccttggccagtatggtcatgttcacgatattgattcttcctacccatgagcatggaatgttcttccatttgtttgtatcctcttttatttccttgagcagtggtttgtagttctccttgaagaggtccttcacatcccttgtaagttggattcctaggtattttattctctttgaagcaattgtgaatgggagttcactcatgattttgctctctgtttgtctgttgttggtgtataagaatgcttgtgatttttgtacattgattttgtatcctgagactttgctgaagttgcttatcagcttaaggagattttgggctgagacaatggggttttctagatatacaatcatgtcgtctgcaaacagggacaatttgacttcctcttttcctaattgaataccctttatttccttctcctgcctaattgccctggccagaacttccaacactatgttgaataggagtggtgagagagggcatccctgtcttgtgccagttttcgaagggaatgcttccagtttttgcccattcagtatgatattggctgtgagtttgtcgtagatagctcttattttgaaatacctcccatcaatacctaatttattgagagtttttagcatgaagggttgttgaattttgtcaaaggctttttctgcatctattgagataatcatgtggtttttgtctttggctctgtttatatgctggattacatttatttatttgcgtatattgaaccagccttgcattccaggaatgaagcccacttgatcatggtggataagctttttgatgtgctgctggattcgttttgccagtattttattgaggatttttgcatcaatgttcatcaaggatattggtctaaaattctcttttttggttgtgtctctgcccggctttgctatcaggatgatgctggcctcataaaatgagttaggaaggattccctctttttctattgattggaatagtttcagaaggaatggtaccagttcctccttgtacctctggtagaattcggctgtgaatccatctggtcctggactctttttggttggtaaactattgattattgtcacaatttcagttcctgttattggtctattcagagattcaatttcttcctggtttagtcttgggagagtgtatgtgtcgaggaatttatccatttcttctagattttctagtttatttgcatagaggtgtttgtagtattctctgatggtagtttgtatttctgtgggatcagtggtggtatcccctttatcattttttattgtgtctatttgattcttctctctttttttctttattagtcttgatagcggtctgtaaattttgttgctcctttcaaaaaaccagctcctggattcattaattttttgaacggttttttgtgtctctatttccttcagttctgctctgattttagttatttcttgccttctgctagcttttgaatgtgtttgctcttgcttttctagttcttttaattgtgatgttagggtgtcaattttggatctttcctgctttctcttgtgggcatttagtgctacaaatttccctctacacactgctttgaatgcgtcccagagattctggtatgttgtgtctttgttctcattggtttcaaagaacatctttatttctgccttcatttcgttatgtacccagtagtcattcaggagcaggttgttcagtttccacgtagttgagtggttttgagtgagattcttaatcctgagttctagtttgattgcactgtggtctgagagatagtttgttataatttctgttcttttacatttgctgaggagagctttacttcccagtatgtggtcaattttggaataggtgtggtgtggtgctgaaaaaaatgtatattctgttgatttggggtggagagttctgtagatgtctattaggtccgcttggtgcagagctgagttcaattcctgggtatccttgttgactttctgtctcgttgatctgtctaatgttgacagtggggtgttaaagtctcccattattaatgtgtgggagtctaagtctctttgtaggtcactcaggacttgctttatgaatcttggtgctcctgtattgggtgcatatatatttaggatagttagctcttcttgttgaattgatccctttaccattatgtaatggccttctttgtctcttttgatctttgttggtttaaagtctgttttatcagagactaggattgcaacccctgcctttttttgttttcctttggcttggtagatcttcctccatccttttattttgagcctatgtgtgtctctgcacgtgagatgggtttcctgaatacagcacactgatggctcttgactctttatccaatttgccagtctgtgtcttttaattggagcatttagtccatttacatttaaagttaatattgttatgtgtgaatttgatcctgtcattatgatgttagctggttcttttgctcattagttgatgcagtttcttcctagtctcgatggtctttacattttggcatgattttgcagcggctggtactggttgttcctttccatgtttagcgcttccttcaggagctcttgtaaggcaggcctggtggtgacaaaatctctcagcatttgcttgtctgtaaaggattttatttctccttcacttatgaagcttagtttggctggatatgaaattctgggtggaaaattcttttctttaagaatgttgaatattggcccccactctcttctggcttgtagggtttctgccgagagatctgctgttagtctgatgggcttccctttgagggtaacccgacctttctctctggctgcccttaacattttttccttcatttcaactttggtgaatctgacaattatgtgtcttggagttgctcttctcgaggagtatctttgtggtgttctctgtatttcctgaatctgaacgttggcctgccttgctagattggggaagttctcctggataatatcctgcagagtgttttccaacttggttccattctccccatcactttcaagtacaccaatcagacgtagatttggtcttttcacatagtcccatatttcttggaggcttttctcatttctttttattcttttttctctaaacttcccttctcacttcatttcattcatttcatcttccatcgctgataccctttcttccagttgatcgcatcagctcctgaggcttctgcattcttcacgtagttctcgagccttggttttcagctccatcagctcctttaagcacttctctgtattggttattctagttatacattcttctaaattttttcaaagttttcaacttctttgcctttggtttgaatgtcctcccgtagctcagagtaatttgatcgtctgaagccttcttctctcagctcgtcaaagtcattctccatccagctttgttccattgctggtgaggaactgcgttcctttggaggaggagaggcgctctgtgttttagagtttccagtttttctgttctgttttttccccatctttgtggttttatctacttttggtctttgatgatggtgatgtacagatgggtttttggtgtggatgtcctttctgtttgttagttttccttctaacagacaggaccctcagctgcaggtctgttggaataccctgccgtgtgaggtgtcagtgtgcccctgctggaggggtgcctcccagttaggctgctcgggggtcaggggtcagggacccacttgaggaggcagtctgcccgttctcagatctccagctgcgtgctgggagaaccactgctctcttcaaagctgtcagacagggacatttaagtctgcagaggttactgctgtctttttgtttgtctgtgccctgcccccagaggtggagcctacagacgcaggcaggcctcctggagctgtggtgggctccacccagttcgagcttcctggctgctttgtttacctaatcaagcctgggcaatggcgggcgcccctcccccagcctcgctgccaccttgcagtttgatctcagactgctgtgctagcaatcagcgagactccgtggggtagtaccctccaagccaggtgcgggatataatctggtggtgcgccattttttaagctggtccgaaaagcgcaatattcaggtgggagtgacccgattttccaggtgcgtctgtcacccctttctttgactcagaaagggaactccctgacccttgcgcttcccaagtgaggcaatgcctcgccctgcttcggctcgcgcacggtgcgcacacccactgacctgcacccactgtctggcactccctagtgagatgaacccggtacctcagatggaaatgcagaaatcacccgtcttctgcgtcgctcacgctgggagctgtagaccggagctgttcctattcagccatcttggctcctcctctcaggtttgggttttttatgatggtaaaatatacatattataaaatgtatcactttaattgtttttaagtgtacaattcagtggcattaagtacactcacattgttgtgcaaccaataccactatccacatgcagaactttattctcatcccaaattgaaactccacactcattaaacagtagctgtccatttccctcttctctcagcccttggtaaccactattctagtttctgtctctgtgagtttaactattctgggtacctcatatacatgaaatcatacagcgtttgtccttttcgatctggattgtttcattgagcatgttttcaaggttcagcaatgttgtagtttgaatcagaatttcattccctttcaaggctaaatatgttctactccatgttatacacattttgtttatccattcctccattgatgggcatttgggttgtttccaacatttggcttttgagaagaaagatgctattgacattggtatacaaaatttctttgagcccatgctttcagttttttctatatatctctagaagtgaattgctggatgatatggtaactctatgtttaatttattgaggaattatcattctatagaaatgtgtagttttttttgttgttgttgttgttttatttgtttgttgagacagggtcttcttctgttgcccaggctaggcttcagtggcatgatcacagctcactgcagccttgacctcctaggcccaagcaatactaccactttagcctcccaagtagctgggactacaggtgcatgccactacacccggctaattttttttttttttttttttttttgagacagagtctcactctgtcacccaggtgtgatctcggctcactgcaacctctgctgcccaggttcaagtgattctcctgcctccgcctcctgagtagctgagattacaggcgccagccaccacgcctggctaatttttgtagttttttattttttagtagagacagggtttcaccatattgcccaggctggtctcaaactcctgagctcaagcagtttgcccacctcaacctccaaagtgctggaattacaggcatggaccaccatgccaggccagaatgtatagttcttaatcagcattccaggtgatgttatgatcagataatttgagaaacatttatttgtcagttacctattgctatgcaaccaaccactccaaacaattagtagcttacaacaacaaccatttatttagctcacaattatactgggtggctcttctggcctgggctgggtttgtctggtctctgttggcctagctcatgtttctgtggtcatttggctggtcttttgggtgctggctgttctcagatggcctcagtcatatatccagtggttgcttggctataggctgaagcaatggcgtgactaggcctagaacctttccttgtttagtaagctaaccccagcttgctcccagggtggcagggtcccaagaacagcaagagagcaagctccagtgcataagctcttttcaagtctttgcctatattatgtttgcttgtcctgttgggcagagcaagtcacctggccaagcccagtgtcagtatagagggcactaccaaatggtgtggacacagcgaggcagaaaaagagctgagaccattactattattattccaccacaacttaactgcttgattcagtattctgacgtgaactcagggttatctgaaaactttctcctgccgtaataaatctgtgaatggagcataatcatgtctgaagttgcatagagccctctgaaccacatgccccagcacctctgcaacgctctccatttgagggttcattcattaatttaataaatacttattgtgaatctactcatgtctggaactcttctaggacctgggtatacagctattgacaaaatagtccaagttcctcttctccagggacttacattctactgcaggtggaaaagttttaggagtgagaataaatgtttggatccctagcacatattcaggaggttttgtggttgtcattgtttaaagaggaagaagtttgaagaatgttctttattccctattcttcaccactatgtgcttttactaatatttgagtagagaaaaatattttggttaattagaatttccaggtatttaaatgccagaaggcagatgcaaacctgtgggaggatattaggattgacttttaacttgtaatccttatagcttggtgcagaagtaaccgtggcttgccgtaagggcaaaagccacaattacttttgcaccaacctaatacaagactgatggattcgcttctcacttcctttatgctttctgcaaggctttgtggctaagacttttggccccatagctacctgagggagggctactgatctttacagctcaaagggcactgaagagtcacatccagctgagcagtgatggatggctacaacagacattttctttggatacttctttattttattattattattatgtgtgtttaatcctatgggagtagaccagcattctatatttttaaagtagcactagtttgttggaaaatttgacttttataaactgaaagtgtatgtcatcagtacctggagatgagatgggtttaatgtccagctggtgctcagaggggctgggactctctgcatgggttagtttgccagctaaaactcacttcatgcacaagagctttcattgaacaacagtcaagctttgcttcagggtaagcaggtatttcagtgggggagaattaggagacagcatgtagtagtattcaaattaggatctttagagtcagacagatgtgtccgttactagcttggaccttgggcaaatgacttaacctctctgagtctcagtttctttatctataaaatgggataataacactatctgccccataaaactggcagcactaacagaaagcatgcaaagcttgtagcatagtgcctgcagtggacacttgattaaaaatgttagctaaaggctgttatcttttttttatttttttagatggagtctcactctgcctcctaggctggagtgcagtggctcaatctcggctcactgcagcctctgcctcctgggttcaagcaattctcctgccccagcctccggagtagctgggattacaggtgcccgccaccacacccggttaatttttgtattttgagtagagactgggtttcaccatgttggtcaggctggtcttgaactcctgacctcagatgatccacccgcctcagcctaccaaagtgctgggattacaggcgtgagccaccatccctggcctaaaggctgttatcttaataaatgctgttctgatctacagttacatcaccacaaactgatgcctttggcctggcccacagtgccagaatctgaactacaggggagttactctttgaaccaccctagcaccaatcctagctgagaaaaagacatttatgaaactgatttgccatttgtgtgtagccagtcaggaattcctacttgggctcttggccactatttgagcaacttttctgtaacactgaaccatagaagcagcccatccaccaccaccacaacaataaaaactagcacttcacacactagcaccttacctggaatgattttagaggtgttagagagccccagaatatctcctgtgtaactttccaccagactttatggacgagccaactaccaagctgtaaattgattgaatcttgtattttcctctttggacttagctgggcccagtgagagtttggttgagagtagattttggtggatgggaacaggagtttcatgaggtaagaggagaagagagagagaatttttgttcatgggtataggagccatgtaagttgtataatttcactataaacatggcacgcagggagagggtgaattgtgcccaggtaggcaggggaaattgcaaggctttggtgttggggagagcacagagataaagaaattacgggtaggagagggatccaaaggggaaatgaaggagagtgaaaggcaaacttttcagctgagttacatgagcgacatcaactataacacaaggtggaaaaatcccatcttcctgtcctcccccatgtgacaagaagctgatctgccttcttggatttatttccttctggggctgtatttctctccttgcgctttgtctcacctcctaccttgttataggcgatctttctccccctgaggaaatcataattctatcactgtggaaattgaagtgtcttcagctttcttaccagtcttagagtattttcttaggccaaattgccaatttcctcttttatggaaaatactaaaatacttttttttaatagagtgaccttgatcctttcccatttgctattctttccaatttctagactggagctagaaaaattgaatgaagttgtcagcctagtggcaataaccacattaaaatgtttctctgaaagtctttggagcagagtccttgggcatttttaccagtgaccatccatgaagtgacagcactatagacacagggttttgtgtccagagaactttccaccagcccttctggtatgatttactgtgtctgtcttatccaggccctaacacagggcttggagcacaatcagtgatcaataagtgttaactcagtgatagggcagatggtcattgatttaaaaataacaaccttgggccgggcagtggttcacacctgtaatcccagcacattgggaggccgaggcgggcagattacctgaggtaaggtggtcgagaccagcctgaccaacatggtgaaaccccatctctactaaaaatacaaaaattagccaggtgtgatggcacacacttgtaatctcacctactcagggggctgaggcaggagaattgcttgagcctgggagacagaggttgcagtgaaccaagatcgtgccactgcactccagcctgggcgacagagcaagactctgtctcaaaaaaataaaaataaaaataaaaataaccttgcctcgtactgttggggtacacacttccaagcagtgacccttggcagctctgggaagctctgagacgtgttcttccttggagtagtccctctcagcctgcgacactgtccatctaaatctgtggcacaggttctccaactctaggaggccaggaggcgctatgtctgacaatcgtttgaccctgtggctccaggacaccccaacactctggactaaacacactgcaccactcctctccttaaagatcttaaggattgtgctctaattagtttggaaatggaatttcttagactatttctaaaagcagctgcagcctggggacaaattgactaaattcaccagttctcctgaaaatgatatttgaaaggaaagttgagctgcttctatcttcccagagaaatctacatgtcattcagatgttggagaccctcaagaggcagaaatgtcttcatcccctgccgtttgggtactgactaaaaccgttgatccttttccttgaagtctgaggttctgctgttggcctctgaaaagcaggggacagaatattctggcagactctggcaagtagatgaccccttgctgggagtaagcttcagccttttccaaggtctgccacaacagaagcagtaacatgagagcggcactcagtaggacaatgacgatgaggctaatgagagcttttggccgtgagaaacactgcctccccaagcagcattcagatatgtagaaacggtcttgttttacgtgccttggtgcctcgggcctgtacaaagtcaccaacacattcaaactggagtggagaattggggatttaaaaatgtgattgctgaaggcagcaccatcttaacccctggagtcatcgagtgctcatttgctgctaggggacagaaaagccattagagatattccctgggtatgtagcccagttatttttgttttttaacatatatcccaagtgattcaagagcatgacaaggtttgggaattacagtccttgagcacaatctcccattggtactttacaaggttatactttagactaattgaacttgttttatttttattttatctgtaatgatatttgatattcattttgtatataaaataattttgtttttatattttgtatatgtagtatgtagtacaacataattattttgttagtaatatttttattttataatatagtgataatgataatacagtaactgcatataagtacttatatacaagatattgttctattgtaatacaatataatcattttgatagtaacatttttattttgtaatatagtgataatgataataatatagtaactgtatgtaagtactacttattatatacaagatattgttctgaatgcttttacatacattatcgcaattaatcttcacaatgactttttgaaggaggtggtattagtaacatcattttacagatgagaaaagacaggcacaaagaagctaaatgatttgcccaaggttccatagcggtcaagtggtggagcttgaatttatacccagacctggcgattcttaggtctgagacttttaactaccacactgtgctgatccaagtggcctgaagctttacaaaatttgattagagagagttgcatcactaggaaacagagagatataagaagtctgtgggaagggaaagaaagatgccttctctgcagaaataatgtttaagagttttttaagccttaagtaaattagaccatctgtttgtggccaggaacatactcagtggaataatgtcccagccaatagaaaaatagactttgcagaaccccagcagtcagttgctgacatgagtatggaatccacaggaattccaggttactccttgctccggaaataaggaaaagcactaatatgaagtagatcttggcttcacccaacctgggagtgggaggaagtctgcctctgaacgccagaaaaaacctagggatagtaggggacacgaaatgcaagcagattcctcaaatctccacttgaaagctagaaagcttcactatgtattctgcactgacagggaaagacaggtcctaattggatcgactgatccttctcttggtgggagaggccttggcctttgtgaaccaaggaagagatttttatgacaaacttttctagatgctttttagctgaagttaaagaagattatgggtgaattagaaaagggatttataatagaactttggattaatttattcattcataaacatttattgggtgctttggctgaattaggcagtactctaggggatacaggaatgaagaaaaaaatggttcgttcccaagaatcttacaactgagtggtggagacagacagcaaaaccagcaacagcttaatgtggtgtttccatagacatgtttgagaattcctatggtctatcaggcaagggcactttaaacttcttaagggttgggaaagtcaagtgcaaaaaagcccccaaagaaggaggctttgcattatgtcacaaagtagttgcagttacccaggctgatatgcaaagacctccctggcagaaggagcagtgtgtgcacaagaggacagaaggcaagggcaccccacagtcctgcgggtgcacggtgagcaaccagaactagccagctggtcccccaactcatgtcctcttttggtggaatctccacacccagctctacaacctcaagaatcccaagccagggtctaggtctcaatatgaagtcagactctgtttctgaagcctactctgtgattctatgcacaatttcatgctaatattcacctggacaatggaaggcatgaaaagccattcagcctcgtttgtgaagttagaattgtcaaggaaaggggctgatacttctcaagtaatcaggcatggggctaaaggctttctgagttttggccaggaggttgttgtttgattttacgtatcgtctttattatgagctttctcacccaactgttgctgtctgtcttaatcactgaaaaccatcctctcctaacctgcagtcatgttacgatttgttttctcctagtctcatattttctctggatgcatttcatccccagtgtgaggagaagccatccctaaatcctaacgctacattgtgtatttctaagcacttgcctcaaggccccactcccagcagctattgatccctgagagactattatatttatttgcattgacacgggggctcaccaccttaagtgaaaggataaacaattaatgtcccagctcctggaagtcggatggcctttctgggatgccattaagacttgtcttggagagggctgtttaaagtagctgctcagactgaactttaactaattattcaatcaacgatttggcaggtcagtcaatgggaaatgatgcacagtttgctgaaattgatcacacttcatttcccatcaattgtaaagccaaattgtgggtaaagtcataagtaaaggatcattgcctgccattcttaggaccatgtttccctatcccttccatttacttaaaccccagcctcatccataaaagcaagagaattttgcacttacagagggaatcagtataaaatgtttaccaccttctgagatggaaggggaagggagagtgttttctatttcataattgatatgttgcagccacataatcctctaaccttttcctctaaccttttcggcagctcagatgtggaggctggattttaaatcccatgatccattatgcatcacttacttccacatctattaccattccgtcagccaagtgacaggattccccatcagggcctttgactgtgtggggctcttcaactttatgctggcggataggcatgtggaacttcatacatgggtgatttacagacaattagcaggaggcaatggcagattaagtgtagctcttctgaaaaattatgaataaaggatgtaaaaaggaaggtccccccacccaggccctgcccaggaaaaggcttagaatgatccaagcagtgaattttatgacagtaactaccaccctctcagaagatgcaaaatggaatgtgtgcttgtccacattgattggcagcttctgaaaccaatcaccggcccaggtcagtagagccccactggtaggccaacagatcatgaagaaagcagagacacagactcggatttccacataagcttcctcacctgctttgttctcccaagccaactggccttttttcttgcacactgggacctgataaaagcctctggtacttgagatgaaccactagacaataatcagaatggaattttctgggaaatgtggccatatgaaaaaaatgatcactttttcctcacaaggatttgcaaagtggaaagagtaggattttaaaaactgtattttgtagcagagaaaactaaggtttagaaatttgaatgacttccttaacaaatatttattgagaacttgccatgtgctaagcacaatattaagcactgagcttactcggtattagtcggaattctccagagaaacagaaacaataggacactcgcacacaaacacacacacacacacacacacacacacacacacacatggagctttattatgagaagttggcttatgcaattacggaggccaagacatcccatgatcagcagattgcaagctggggactcaggaaagccagtagggtaaatcagtccaacctgagacccaggggagctgatgatataaatcccagtccaaaagcaggaggagatgagatgagatgtcctaatttaagcactgaggcagaaaaacaggttgttaatcctttccttaaccttttgtcctgttcaggccctcaatggatctgataatgccaaccacactgggtaggaccagctactttactgagtccaccaactcaaatgctagtctcatccagaaacaccctcaagacacaccagaagtaatgcttactctgtgaaccctgtagctcagtcctcacagggctcacagtccacccataaatatgtacatatattatgtatcaataaaaattgttctaattgttttaattaaaatgaagagctagtagtctagtggaggagacagacctgaatgcaggcaaaaatgatacaaggtggacagagctgaagcggttgaagtggaagtgctttgggggttcagaggaggggcacctgcctcaattttggggtggcagagggtccagcaaggtctgtgctgaggaaatgacataaggcatcaagaacaagcaggagtgaaccaggtggagaaggcttttcaggcagagggaacagcatatacaaagccccagaggcaagacagggcttcacaggcaaaaggttagaggccaaaatacaaggaggaaaaggggagagaggtgggctggagagacccaggggcctgttcggggaggcgtgtgtgagcttgtaagtagctttctcctcagagccaggcctctgatcccagcatcctgaaaggcagggggctcagtttcagctctagccaaattcaccctcctccacctcctcctcctcttcccctcaaatctccttcatctacccccacatcccctccttctccactcctccccctcatgctcctgtatctcctccctctcctcctcctgtatctcctccctcccctcctgtatcttcccctcctcctcctcctgtcctccccctcctcctcctgtatctcctccccctcctcctcctgtatctcctccccctcctcctcctgtatctcctccccctcctcctcctgtatctcctccccctcatcctcctgtatctcctccccctcctcctcctgaaactcttcctcctctttctccactcctcctcattcttgctagacggaaaaaatagttatttattttttattgatacataataattacacatatttatggagtatgtgtgctattttgaaattttcctttcggtcactgtcaagcacttctggaggtaatgccttttctacaaagtgcacaatggtcattgcacactcaaacatcccccaaccccctgccccctgaaagaaggccatatgggctaagtgatctgatcaaagtcacttggtgctaattagagatggagctgggatttaaggccaggctctctgtcccagctgctttcattgtgtaaactgaacgctgacttggcctctttgtatgtcactcaaaaaactcactgggatgcacacccttttaaatgacatctttttctttttagaattgtttcatgttggagaaaataacatggttctcaagcctttcaacagtcctacatccacaaaaggggaaagggacactgcactgaaattagaatcttcaacaacttcttcaatcttccctttttaattgggtgaaagtaatgtactcctaattatttgagaaatgatgtgataagccccattattaagacctcttttttctgagtgacatgagcaatttaaaaggaagggaaattaacaatggcatgaatggtgcattatgtgctccaagttcgggtacaatcattgaaccaaaagagagggggcaggggaatgagactgggctttctcgtaatatttctgagttggtgagcatgaagggagaaaaaagccagtccaagcttgtgtttcagactctgtaatcaggaaaaggcaaaaaaaaaaaaaaaaaaggtaaagacacagtatctttcccttccttctcaagcagtaaacactgggggacacttctagtgagtgcatctgacatcaatttctattcttcagcatcggaatgtcaatgaagtagaacaggggatgtttccacaagatattaagatgacagacagtcttactctctgttcactggagagtagaattggtagctctccaactggtatgattttagggggtgcaaatacaaatgcctaggggaaccaggaaggagctctccatgggcaaggctggcatgggtgagggtcaagggcacgggagcatggcctctctgcacgtcagggctgctgctccgctctgcatgactgtcatcacaagcaagagggacccagggatccaggtcctctgagttttcaagggaggccaaaggattctaggttttatctttatgtgtttaaatgacaaagctcctcattttgaaatgttgcagtgctgttgacacgttactaataaggtttgtgtccttatgttgtagaaggaaaagtaatggtttgctgaatattattaaaagttcttacgtaggattttgtaagtctcaatagtatgagaaagaatgaatgtgagatagggatttggtattaaatattaaatacaagtcttcagaatatggaggtcatattacagagataatatgtaaagagacataatatagtacaatggaaagaacactacacgtgggatgagaattactcaggatgtccacagacaagggcttcattagccctgcctcagtttcttcatctggagagccaaagattcaattcacagtccatctaggctctcttctaaccttaaccttggtgacagccctagacccacactgaaatccatcagagatccttcattggcgctgagcagtttatgtttcattctgaatgatggagttctcttccattaggcaacttcaggcaagaagaagaagactgtatcaggggttcacaaaataaagaaaaaagaaagcaggaaggagagttctagaaagagccaccctttagaaaaattctggtgcaccttcatcttctcaccatcacgatacccccatttttgcttctaagtctttatagatcataagtcaacttcctaccaacagttaagaatcttaacaacagttagaaactcagaatcctagcagcacaggcatcttctgagtactcaccatgcacgaggcactgtgccaggtacaaacattcatattcctcacaacaaccccaagtgataggtttctagagaactgttactgtacacatcttgcagataggagaactggggctgagaaatggaaaagccatttgtgcaaatccacacagccaggaggaggcagatcacccagcactgactccacagccattgatcctaatcactcccaagaggctgaaacatgtgctacaccagttgggctctgggaatctggcctcagtttaaatcctgcgtctgccacacagtgaatgtccttgaaaaagtaatttaacctctttaaagcctcagttttccgacctgtcattgagaagaatgaagtaactgccacaagttttgaggattagtgagctctacataagggatgtcaggtacattataagcgttcaataaatggtggtgattattgttattagtccactatcattcttaaatatcttgtttcttactgaactgctaggagttgcaaaaccatcctgttaagcaggaaaagcaaggaagccacttaacagatgcaaatggcatttcacaagggagtcagagacaggggctgagaagggactcagatggcttcagcccagctcctagctgactgaacagatcacttccttgaagcctctagaggaagcagtgaaatgatatcaattcccctgagctttggaagggaaaaagattctatcttgcttaaactgttctactgtagagaaatcatatgctttagatgccagggcaggggggagatacccctggatcttcccaaaggtcatttgttgcaggcagagggattaaatacttaccactgcttgctggtatggaacactgaaaacacatcttctctctagatagaatatatgaaacaaaaaggaggctcccttctgccagctgagggaaattgcagggcagtgcactttgtcatcactgtggaagtgcctggtagaacaggtgacattgggcaagagaaagcccttcagtgccagatttgttttcatcactgtgttctgttctcatcatattgtggtgtgagactcgcaaaatctcatgcattctcaccacgggagcctgcatcttcattgctgaagggaagtggagagctcaaagcagttcatgcaggcaattcctccaaaaagttccccaaactatctggagcatcatctcattctccacttcaagttaattccaaaggctggcctggaggaacttctgcacagaatttataattagcccagctttgtggaatagtcaggcctgagtcctttgttcatgctgatatgagtagcagaagggtttctgcaagttcttgcccagttgcaattgaagtgtttaggcggttagctctttctgctagaaaactcaccttgggtgtgcctgccactctggcacatgtcttcaaaaatgtgctttgtcacatttaaatactgatgttttgttcctagttatggaaatgtaggagtgtctgtctgatggttcatttctaacccccaaattcctatcttatactttaaactgccctgaaaatcaaaagcccttggaatcaaactccagatacacagccacattgccaacacactactttagcaaaagatccagaacatattttacatgaaaacctgtcagactggttttttattataaaaataatgtaaagaattgagccaagcacccatgttattctgatgacaaagaaaactaattgtgctaataacactaagcaaagtcttcagcaatcattctgagctgtaaattgggcatgcttttttaactgtggagcctctttatgaggtatatgaagataacaagcatgcttttgaggggattcttgtgtaattgacattttttaagtgccgagaatgtggttctaagacacatttgagactggggtcttgcactcgttaggcagtccaaagtatttttagcttccttctcattggagagctagcatttggggcgtagggagaatgaagcttatgccatgcttttgtttcctttgttgtttgtttgtttgttggggagtgtggggatacaggatctcactttgtcacccaggctggagtacagtggcacagtctcagctcactgcaacctgcacctcccaagctcaagcgatcatcccacctcagctccccaagtagctgggaccataggtgtgcaccaccacactcctctaatttttgtatttcttttagagatgaggtcttgccatgttgcccaggctggtcttgagctcctggactcaagaaatctgcccacctcagcctcccaaagtgctgggattacaggcctgagccactgtgcccggccttatgccatgcctcttactgaatgcacctagtaacaaactaccccacacttggtaattgttcattattattatctctcagaattctgaaatttgcagttagatggaggctgaggctggaatcattaaaggctccgttacacctctgggggctgatgctggctggtggcttgcacctcagcaggagctataggcaggaacacctacagatgtcctcttgttgttacccggggttccgcacagcatggctgctggtttgcagcatcaagtatcccaagacagagagccaggcagaagccacatcaccaattctaatctagccacagaagccacacagtgacactttccactgcattctgttcttcgcaggtgagacactaaggtgagcccatatttagggcaagtgaaactagattctacctcttgatggggaagtgtcaaagaatttgaggagatgaaaaacttcaaatcagtcttttttaaaaaagtagtcaaaccagtctctttttaaaaaagtattcaaacctttcttccatcccctgcttgtaaactcacatcctgaggaataatgacttgaataattctaccagaatccaagaaaccaaattggttgggggcagggggtatgttgcttttattgtttccaagatgaagttctctgtgaaactagaatgtggttcctcttatagaaccctctggaattagcaaatgattcccaaatagtacaggtaagactcctgagtattaatgacttcattatattttgttgccgccatacttcaagtcaggatgcttgatgacttgatgtgatatgtgtgtgtctcctcccatccaccttaagataagcaataggcaatatccaattgtgtgagaacctgcattgttcacatgagcctttgtcctggataacagctcctgttcatcaatatgatacattgcactctgactttctacttctgtctttctttgtggatattcctttctcctctctgattgctttttcttcttagaccattactctagttgatagtgctaggttatcattggatcccatctccctctccaataagcctgtgattgatactaatcttcctcatgggacacattttataggatgcacattggaaaaccactctctaaatcttagctttctatgtgctgacaatttacaaggttgcacctcacacacatctcaggaggcttaaggggaaatttgagagccatgtaatcacacctcctaataagaacagaaatgcctttcatacacagatgctgtcatgccattcagcagtctgtgctgcgccccccgtttgtcttttttcccccagccaacaaaatgcacatctagggaagtgctatctgggaagtggccagttcctagaagcccagcatgaatcatttctctcttctgcaggagagtagtgttttaattattctaatgaaagctttcacttgccattgaatccataaaagcagaaaattaaggaggttgcgaacacctctctgaagcagaaaccttgctttataatatacctgcacctttcctagcaaaactgagaccccaagaaatttatagacacaggatattacccttccagtttaacacatgctttggcattgaaattttacctttccagacccaagaaagtattttgtgaaaagttttaatttctcatttgaagtttgtacccctaaaatatgccagccaagaaagccaatataatgcagtatttgcttacaacaatattagattcagtgtgtcctttaaatgaaggcttgtgtccagaaaatagagggaatcatgggactcaaaactttaaagcaacctaggctagattaatgatttgattattagtttataggaaactcaaaggaggatgctgtggtctcttatacctcagtaaggtcacactatggaccagtaaagtttaagcattaagaaactgggtttgttttgcattttaacttaaaaattcagacccagttatatccattgtgaaaaagtaaatatttaaaaacttgggttttctggaattgcgagatttcattcccaattttgttctcacctctgaaaatgggatacttttttgtattggcccttttaggagaagtgacatctcagacccctcctgtctttcttcctctaccatctgtgttctttatggatatatatttcttggcaaatttggtgtcatgggccacattgtgtctccccaaatttgtacgtggaagtcctaattcccattacttcagactgtgactgtatttgaagatgcaggacgtacttaaggaggtaattaagttgaaatgagacctttagagaggccctaattcaatatgactggtgttcttatgagaagaggttgggacactgaaaacacaggccaagggaccatgtgaggacacagtgagaaggcaggcccctgcaagccaagggaagaggactcagaagaaacccaatctgccaacaccttgatcttggacttcagcctctggaactgttgcggggagggattctgttatttaagccacgcaaccagtggtattttgttatggcagcctagcaaactaatacattggggatttctcctgcatataatagaaactcatttttccatataacaaactaaaacccccttgcacatccctaggtacagctctgtgcatggtgacagtggcataaagctgtaatactctccatgacttagtttcagggccaccggcaccaggcagagactggaacccggtaagcaccattgaagctcttccagcatgggttcccactgagaggcaggcagagcaactggaggtttgtgctgacaaagcggcatggagctataatgtccagagccactcagaactgcaggatggcacaagtcaagaaggaactgtgtcagagcagaggtgaaatctcggacagctcagaaatcttggcactgaaggaggcaggagccttcacagttagattgagagtgggcagttttttctctatctgttgcactttattatattgttttttaaaattattatcatatccagcaccacagggaagggtgaggctgagcacaggggcctggtagaactgggtcattgtagcgccaactagaagagtgtgagctacaaagcaggaagaacagtttctcaaaggggccggatgggggtagtcattggggtgccatgagcaggtgtcctgtgctgatgctggcagattaagcccgcatgggtttgcttcacattttaacttcaaaattcagcctcagttatatctactggagaatatacacatgaataaaagggtcactgttaaggagacagatctgagagagcccagataacaagctgcaaccaggccccaggcagcagaggaaagggctgcttggtcagtgtgggcctggaagcttgggagcttcccagaagccaggaccacagctttattccaacaccctgcagctgacccaatgtgctccccacagagaatgttctcgtaagaccttgtacttttctttcatagcattggctgcagttgtaattttgcatttgtgcaattctttggttaatattggtcttccccaccaaaccgcatgttggtgagggcagctggggctgttttactctccactgtattccctgtacctaaggtggtccttggaaagagctgactctcaggatatttcttgaatgaatgaatgaattgattcatgttaatatcacctccccttctccaagtactcagaatcttgctactggtacaggaacttataagatgcgtggaaggccaaggacaggagacagcatctcccaggggctcactgaaaagcctgtgcccttttccagcctccgggcctcatattgcaggtgcctccaggcgggctggggagcatctcacctctgcctagcactgtgtgctctggatggccagggaaggtctccagggcgggatctgattctagggatttcgcaagggactttgatatgtgagacccagaagctccctgcagagaacaaaggggcagtgtggactgcctgtggagcctgagccaagatatgatctgggcctaagaaggcaccatggcatggctattcagtagtccacagtcctgctctggagcaaaccaagacctaaccagccacagagcaccagaatccccagctggtcagttcagggatttagagaagcttcctttctcccaactccatctgctgtgacccaccttccttagtcagcccctcaccagacaggtcctctttcttgcctctgccctttctaccttcttctgtatccttcccccgctccaggctctctctctgtctgtggattctctttgtcctgggtataggcataaacataataggcattaagaggtactggaaagcctgatcgattctgaagtcttgcactccccagccatcctattaaaaattttaaaatacctaatattccaccaccattatcccttttggctttagaatttacattcttacgcgtggacacaatttactttgtgagaatcaactgtgtctatgaacctgaaatagtctgttaaaaatggatcatggagcccgtgtgctcacgcttgtaattccagaactttgggagaccaaggtgggtggatcacctgaggtcaagagtttgagaccagccaggctaacatggtgaaatcccctctttactaaaaacacaaaaattagccaggtgtggtggcagatgcctgtaattccagatactctggagaatcacttgaacccagaaggtggaggttgcagtgagccgagatcacaccattgaactccagactgggcgacagagcaagactgtcttgaaaaaaaaaaaaatggatcatagagtagatcaattttgatcagaaaatgtcactaataaaggtctggaacatggggtgcatctgtagccacatgggatccttgggtggcccggaggctgtggtggggtgaccagttgggggtaacatggtaaggatgcttggaagaagaaagtgagagaagggggtcaatggaaagacataggtcagtgggctcacagcctcgtccactgtgccgggtcatccagtcccactcaggctccctccctcctgctgcccctcctccaggcagtcttctcccctgcagctacagggccccagctgccaggccccagagacccacccaccctccacgggtgggaaacatgaacacaggcaggtcagctcagtcttctatcacaaagctcacatacatagggaggcccagcctcgtccaaggctgatttcaggaaagaagattattctccaagattttctcttaggaggcagcaccacaaaatggaagaggaactgactgtaagttctaacctgaattctagtcttggctttggcagtaactcactgggtgaccttgggcaagttccttcgcctcccagggcttctctttcttccatggcacttatgtggtttattttaaaggtcatgcatgctatctttgacctgtctgctgccattttctttggaaaaaagagccctgggagatatgattaaggagagagtcctggcctgttagccaggggagccctcctgcccagaccctgtaagcactctggataaccctctgctcctcttatgttaatttcctcctctttctcacctatcctgctgtctccatataagggcacagcacggccaattgcatttaaaattgccttctaaaaggcacacacatgcatcctggctggtcagtctttgtgtggagctgggactgattcatctcaggggcgtaattccagctttggcactggcttgtggaggtgtcattgagaggggttcagagggctaagcttaccaaccccccagaagaggggacacatagccttggctccatgtgccaagcagcagcataatatgcagggctctgcaaagtcagcagagaaaggacagcaggtgtcaaccactgcacatgttttacttatttattgatttacagtccatcttcccagtttgtatatagcctccttcatagtagagattcagcctcattagctgtctctggcatccttagcttgcagaatggtgcctggaagatagtggaccactaaagaacactttctgaatgaatgaatgaatgaatgaatgaatgaatgaatgaatgaatgaaaatgtgttaggtacaagtgttgtgctgtggaacacactcctggattctggctcctgccccacaggcttgtccccaaactgatgaagagcaaggcaggcactgcgcacagtggtttgggtcatcagcagtccaagaatgttttccccagtgtaggtgctcccccaggttgatgggagtctgggagaggtggtgctgacaagagagtttcttcacctccactccaaagacagaaagcaacgaaagttaatgacagaagcaagcagcaggtgccagtgccagctccactgctcagtgcttctggatcctttcacggttctgtaatgtactcagtccccaaaggtatatctcctgccttctaatcacttacaacaaaaacacatgttgccctttacaccaaagataaattgaaaggtgttcaggttctcttctacttgggcttatgaccaagtctcagagcacctacattagggggcaggggtgaagtatactttcccattggcctcttccaattgctggaagtgcgagcttaagaggggtgaccatttattgagcgtttactgtgtgtgttgaaaactgtgccaagctctgtaaataagacaacatcccaaggcaaggcgactgcaatctcctgagaaatgctggcaaacaaaccaccattataaccgagttggagtaattcagggcagagatggtggagggctggactgaggagcacaatgggaactgggagacgcagagttgagagaaattgagggttataagacttaatgattgatttgttgaggagaaggaaagggagggtttaatgtgactcccgggtttctggcatgggaagccaggtgggattacaaccttcactgcatggaagacagagtggcagatctggggagactgaagttgagttcagctttagacgtgtttggtggtgatgttctgatgtgccgtccaagtggaaaatctcattaggaattggaattatttaataccagatatcatttaatgagtgggggagttttattgtttcagtatttttacacttcaatagtgctttagagagacatgtcctcttgtgtttgacaaaacactgatttgcagttctggtatccctcctgagtaagtcttatttttgagataaacatcacatcagccccgagtgcaactaaaaatgagctgggccagggcagtggggactgcagtctgtcaaggctctgtatttaacaatgcctttctccagtggcctctgccctgtgcctcccacactgtcagctctaaaggatatttagtccttgcagcctcaaattctttaacccttctttggcctcttaagacaagccctgggtatcactgaaacctaaggcatgtccagaaacaagcacaaaagaagaatgtgaccactgctgcttaacctggccagagaaattcactaagtcttgcacctgaaaaaccgaaacaaaacttcctagcaaatcaggttcccacaatcaaaggatggaaaatctcactggaggttggaaaaatgatcagagcctcttcaaaacttcaggacatcaaaagacctcactgtactcttattagaaatcaagctggaaggaaacatcatagtccttcaagtgacacatgaacgaatggaaagccgaaacccactttctgcagcttcagaaattcatatttttattcattcaaccaacatttattgagtgtcttttatatttaaaacactttgtgggacagtgtgggacacaaagaaaaagaaagttattctgtctcccaatgaagtgacacacaaatggctgagtttggtgaagaaataactgcagtgagtagtggggtttgctgatagcagtggaggaggtggaagctcctctacagattagcttattgaaccctcacagctttatgagctcgggtctagcattaccattattttataggtgagggaactaagacacagggaagttgagaaattttcccaaagtcaacagttggtaagtgatgggatttgaacccaagcaatcattattaaagacaactctgctgaataagtagcttttacataggacctggaatgttgggttggctgtcaaaaactgcagctgggacagctgggagtgcatttcagatgaaggctattctaacaggaaaggcaaggacaggttacatttggatacgtgggtggtggtccagtgtgggcatgtgtagagttcttgaaatggatcagtggaaaataagctataaagggtcacttttagaaatatagacttccctctttagggatgagggggttacagaagatcattacgttggagtgacatgatcagaactgtattttagaaagaacacatgactcctgcactctagccacttagtacaataagtggaaaaaagagaaagtttcctggcttctgaaacaacgagtatagttacattgcctgctgtcacaaagggatccccaaagatgtgtaatagctcaaaaatgacagcttttgtcttgttcacatggtcaaaaaagtgggaggttctactatgtctcatccaaaccatggtttagggacttggtctccttctgttctttggctctgtcacgttcaatgtgtggcttccaatgttactatgccatgtgtatcaaggtgtcagaaagggaaagagagtggagaagacagttgcttctgaagttttccaatgacctctgctcctgttccattaggaggcacagggctctccctagaggcatggggactagaaacgaagtccctgactgggcagccacttccatctgtgactccatactgtggaaggaaagcatgaattttggtggaaagttagtcatcaccatcatacctgagtgaggaaagaaaaacacatttacccttcagcagtaacttttcaaagtagtctgacacctcattttgaagcctggttgagaaatgagttttacgagcaaatgaggcttaaaacaacataagcacagtcccatttagcaccaaatcttatttgtctaaattattgttgaaggttccaaattgattttatactttcctacctaagtgaacaaaacttaatttaagcttttcttgatgacttaggatcaccattatgaatgtcatttatgggaatgcagtgtgttgtataccagcagcttttgagtggtgtggaaatgttagttcctgggctgaatgcctcctgaattctaggctgttccattaagtctcttcattaacctcttgggtcccttagaatttttacagtcactgtgtattctcaatacctcccatttctatgtttctctgctttctgatttctcctgccatttttattatttactaacccattcatgtaggttttcttttttcttctttaagactccccaatcctcttttctttccagtcctttcactgattttgttttgcatattatggtggaaagagcaggcacacatgtgggagtggctttggcctcagcactgacactagctgtgctgcagaaactatgaccttgagcaatttaacccctgagcccctgtttcctcaatataaactaaggtggtaatatggatctcacaggcttacattggggttaactgagatgctagtaatagtataaaaattcatctgtaaaaattgatcgtcattatgactgttattttggcagttggacctggtttttattgtcgtcgtcaatagaaatagaaagagtccataggactccagggagttggaatccagacatgaacagaggaatagctagaatactcgagacatctctatggagtggacagctgaagccatgagtcaggctcctgaaagtctccaagaggttatagatctactaatgtgcttaagcagaatctcaagaaaggtctaatataaatggatgaagccataagaggaatatcaagaaaagaagactggataaaaatattccctgtttctaagaaaagaagaagttttctaaaccttgaaactcttttaagctatcaatcctatctgccaccattcactcccagccttcttgaaggagcagggggcctccatctcttcttgccaggaatctgcttcttgtattttacaattccttgccaaatctgggcagagtcagcggagtgaaggcagttgtgtctgggcagtctgcctaagagtttccattacataaacagtaggtgcttaataacttgcattgtgcacataaaagggaaaaagaagaaaatgtgatttttcactgctacagagtaaaccattctgtggccccagaggatgcatcatgtttagcaagattaaagcaggtggcaaagtccctccccagtgggtacatcacagctaatgtccatcaatgattagcaaatgagtagacggtgcctttgtcaataatcctgtttctaccctcatgctttatttatttagctaatggctgcctagctggtagctcatcaagatggtgtttactgagcttggcaaagtgaaaaattatgattttgtttactcatgtgtttccagctggggtgctgagttgttatccaggcagctgatgaccgttcttccactctcagagcccctaacacaggcagttcagtaaacaaaccatcagcttgagaaccagagcatcaacactgccacaatctggttatttgctactttgcagtcgtcagtgtccagaacctcaaatgatgactcattctggaacctcccttatacttagataataaaacaaatagaagtcaggttaagtgtaattggtttagtttgagctattcagttgtttatgagaaaaatgagtatttgctccaaattaaatatttgatttgggatagttttgtctcttgctctatactcaagcatgtaaaaatagaatggaaacccaaacagaaaacctgggagagactatcactctggaatggttctcacacatgcactaactaatttagttatttgtacagcaaatatatagtgagtacctactgtgtattaggtcctggggatattgtggtgacttaaacccaacacaaacatgaacctagttcttcagaaccttgcaactttgtaggaaagagagacattgaatcagtgattgtcaatatgatgagaattataaagggagaaacagggtgcttcagtagtcttggagtttagggaaggatccttgagaaagtgatgctttgaatgggagatgaaggagttccaaaaatcatagacagcgaaaggcagagagggtaagcttaaatattattattatctcagttaagtcacaaaataactctgcgaggtcagtattattgctccggtttacaattgaggagacttgggttccaggggaagcacgtgcaaagacctgagaccagactttatgaatagtgccacttggagctacaaggtcgagcaaaggcagtgtggctggagtagagaggaaccatgagaggcatgagatacagagggacttgccaaggagttcctaattaaaagtgcattttagaaagccactctggctggtatggagaatggattgaggtggatgtaggaggactggcttagaggcatggcagtgactgggtgaaaaagatagtgagttgaaccaggggtggagtcaggggaagcaacctgcaggaagatagaaatgattaacgtcaacagacatacaggaggttgggtcagcagggtcagtgagtggctggatatgaggggagaggcactgacaggttattctacatggctctctttatatctgtaacaattgagccataataatactaatagctgctccttactgagtgtctaccatagtcattctatagatgagaaaactgagactgagagtagggaagtacctaccaatagatgactgaactgagatctgagccccagcctgactcccaagccagtgctctctccactctaacactgtatttatgattctggtcaattcaatatttttctcatttggttgactgaaacctcagatttttcccccaatgtaattcagctatatatacgactccaagttctcataattcttttgcatttgaccattaattctcagttatcttccagatttcgagccatgctatgtttatcttcaggccatttcaaacagcagaggccagagaagccagttttgtggaatcgggcttgtcgggccacattaaatatcacctcactctaatgaaaatgcaggtttttgtttgttctaatgagcgcagggggcctttatgtccaatctcttcctagaggaagtaattgcatacgagtgacctttgaaggaaatcacatcagggagttatttgaaggcactgaggtgagccagtgcgtaacatcaaccaatgtactagcatttcagaaaagaaacaaataggcctgtcccactgacaactcatccatgccccctttggacagagaaaaatcatctactgcttgctgagaaagtgaggcactgaggcacagagatttctttaactatttcttgaacacctactgtatgccatgcactgtgcagaatcgctgcctcatggcactcctgttttagtggcagggaacagacaatacagaaatttttaaaaagtttaaatcattaaagattttgataattaccatgaaggaaacaaattggatcatgagaggtggtgaactgtacctcaacttcctcatctagttaaaaaggagagaatggtggaacttgcctcttggggctgtcttcaggactaggttagataacgtatgtattgggctcggaagaggtcctggcacattagttgaacacttagtcgtgttatgtggggtaacatcgttgttatagaataagtgggggaggcagtcaggaagggcctcctggaggaggtgacatttaagctgagacctgagcgatgaggagccaagcttatgaacaactgggaaagcaaaggctggagaccagagaaggaatgcttactgtttcccaggaacagaaaggagagggaaatcagccaggccggagaatagagagtagggtggggagtgaaatgagtgagggccatgaggcagacaagattccaaccaggtaattaactcagttttactctataagcaggggaagggagtggtgtgagctatgctttgaaaccccactctggcagctgcgcagagaatgacctgaaaggtgaaagctgcaagacaaaggaggagaactgcaaagtcgaggcactggtgggagggtgttaggcagagggtagcgaccttgttggtggcaaagtattagtttcttagggctaccagaataaattatcacaaatcggctgtgtaaaaaccacagaaatttactctctcacagttctggaggttaaaagtatgaaatcaaggtgttggcacagcgcttgttccccctgcaagctctagggaatgatacttccttgcatcttccagcttctggtggttgccagcgaatcctccgtgttcctcacctactagatgcatcaccccaatctctgcctctgtcatcacgtggtgctctccctgtgtatctctgtgttttgtgtctcttcttataacttcaccggtgactggattgagagcctaccctcatccagtatgacctcaccctgacttacatctcaattacatctgcaaaacctctgtttctagataagatcatattcacaggtaccagagagtagggcttcaacatagcttttgagggaagcagaaaacccacaacagcaaggtgagtcctgactgtcccacctctaaggggatgtcctggcttgaaagtagccccccatggcccagcttctggggtaagcaaaaccgccagccatgcacaaaggcattcagcatctttcctgtaattgggggttgaaatgctgtatagcgattcccagttgcttattccaaataagcaggcaggtggtgcagaggaaggcagcctgcagagtgagggcagcatgtcaaacaagggatgttccttcttatttgtctgtttccttaaaaccacttacacttctaggttgcaacttaagtgtactattatttaaggattccttttcggtgagtacccagtgactttgaacagtctatggatacaggtggattttcttggatttttagaagtgaggagacttggggttcatcccagatgctacctttcgtgtatggttttgaacaaatcccatagccccctgaggttccacttcttctgtaaaatgaggatgctggcccagcccagtggttcttaaccttgaggatgaatcagaagcactggagggcttgggaaaacacagattgctgggccccatcatggagcatctgattcagaaggtctagggcagtgcctgaatattcacatttctggcaagttcctagactttgttgttgctgctggcctgggaaccacactgtgagaattgctggcctagatcatctctgagatttctgcaacaatattattccataagtctatgaagctcattttaatgtaaatgactagatgaagtgaattttctaaccttagctagcaaaatttggatcccatataaaaatatgtcccagctactgctcactctgtttttcactttgggtttacctctctagacttaagggtgttgtacagagaatagaaagagagaggggccatttaaacaacacccttaagtatagagaggtacccaaattttgctagctaagactagaaaattcacttcatctcctgtggctagtggggcctccacatacaaggctcccagagaagtcagctgaatgttggcttggagcccaatagaatcacttagctttggtggcacttatttagggtggagggtggggcatagtagatgcaattgaaagcctgagaataatggcataaataagcccatgaaaagatgttcatcattagtcacttggaaaatgcaaatcaaaagcacagtgaggtacttcttttcacccattagaataatcaaaagagacagtactaagtgatgacaaggatgtagagaaattggaactagtgggtgggaatataaaatggtgtagccactttggaaagtagtttagcagtttttcaaaatgttaaacaaaattgtcatatgacccagtaattcccctgctagacttccattcaagaaaaaaaatgaaaacatatgtccacataaaaatttgtatgtgaatgtttataataccattattcacaataaccaaaaaatggagacaaatccaatgtacatcgaatgatgactgaataaacaaaatgtggtatggacaaaaataatcaaagtactgacacatgctagatacatatgtgtatatgtacaagatgacgctgaattttgatgaacctcaaaattactatgctaaatgaaagaaacaagacacaaaagactatatattttattgttccatttatgcgaaatgtccagaaaaggccaatctttagagataaaaagtagattagtggttgcctagggctggacatggaagggacagtgactataaatggacatgagatttcttttcaggatgatggaaatgttctaaaattaggtcatgctgatggttgcccaactctctaaatatacaaaaaaattatttttaattcatgttttaaattgagggattttatggtttgcaaattaatctcaataaagctgttaaaaataattttacaaatagaatggaattaaataaaaaaactaatgggatttcctgcacctccctctgaaggtcatttagtgctgaaggtggttatgacatatgcagattccaaatactgggctttagaaaatattatcctagttacccagtcagaaaagatcaggaactgcttactggaagaatggggacacttaaaacacaataaacacatctatttcacactccttatgtgccagacactgtggttaagtgctttacatggcttatcattcacttattctttgcaaagtatatttgttgaacaccttctatgtgctgggcactgtccttggtgctgaagatactgtgtgaataacacaaagtccctcctttcggggagcttaaacgtgtagatgtacaaatattatcttaagattattttaggtagtgatacatgaatttaaacaaaaacctggatgatgagaggtagttacagtaggtgggaaagggaacagtttagattgagtggtcaaggaaagcctccctggggaggcggtctgaggtaacacgtggaaaagtcatcatgcagacatgaggagaagagtggcttgggtgggaggaattgctaacataaagtatatcagacagcaagcagtagagaaatgacagtgtaagcaagggagagttctgtacaggatgatgctgaaaggatacacaaggatagaagctgcagatcttgagagccatgacacagagctcagtttaaagtttggcttttcatggaatagtatacagccatgaaaaatgaaatcatgtcctttgcaacaacaatatggatacagctggaggccattatccaaagtgaattagtgcaagaacagaaaaccagatgccacatgttcttacttataagtgggaactaagcattgggtgttcatggacatacagatggcaaaatagacactggagactactagagtggggaaggagtgatggggcaagagttgaaaaaactattgagtactatcctcactacatttgtgatgggatcattcatgcctcaaaactcagtatcacacattatacccatgtaacaaatctgcatgtgtacccctgcatctaaaataaaagttaaaattataaaagtaaatataaaaataaatataaaataaagtttggcttcttattccaaaagcaataagaagcaaatagtaagatctaagcaggtgagtgacataatttgatttacatattaaaggggaccctaggatctacataggaacagaaatataaaagatagaataaaagaagtgaacttaagagctaagagtgctgcaggaactacaagacaatgggggcttagatgaagatggtggcagcagggatggtgagaagtggtaggatctggggcatatgtagtaggatagacccaacaggattgtctgagttgtaaagggcagagaaaaagaggtatcaagaaagatccttgaatttgggcttgagcacctgggtagaaggtgcaccattacttgagatggcaaagcttccctttgagtttggctttactatcttcgtgtcatagatgaaaaatggggctcagaaaagctaagcaactttgcttcaaattacctttctaatgagtagaagaagcagagtcaaagtcagtgactcaaaaaactatcttctaaactgctcagtactgccttctgcccacggatttcttgcatccttggccagccagtagatggaaatcagatgaggtggcattcactgggtggagacagaaagacttcttggcagtgaaggctggtgggtgggcttgtcatagaacaaaaaagaaaggaacagcttggaagagtaacacttttctagtgaatcacattaaataatcagcatggcttatacccagtgtcagcctgaactgagattgacagctaataaaaagcacagtaattacaggaaaacatcagattggaaagtacagagattcttgaaacacctgaagccatttaatatgtcttatgtttgctccagactaacaggcagctcccagagcaagaccggtctcattactgagctaatggacattatgctctgaggtacttttccctctgccaaatatatcagaattttaaaaacggaagcctgatattgccatgctgcaaatgtttacaaggacatcgctgagtgttttaggtgtcaagtttaatttcagttggcctggcctattctcttaaggaaggctccagagcagtcagccaggtcacagggagaattccttctgctcttgctcttcaggctgtgacagaaatcagaccttgattccctgagcacgcttcccaagaagggattgctcctgtcaccacagcccaaaggagttagttgtgatgaaagttgtcatgcttcgctattccattattttaggtatgtttgggggttttgttggtgatggtgctggtttttgttgttgttgctgggggtgggcaggggtgatggaaggagaaactcattcacacattctaaaatattcatgagtcctcctctaaattgcagatagtatcttagattctgggatgatggcaaatacttaaaattaccaaagcacaaaagagacagcaaaaataaaatggtaagatctgagtgtgcattcacatgtgtgtgtgtatctgcacactccctctagagaccccacccacctgcctcccactggctcctgtacagcatgctggcttctgggggcctgggctgtagctctgagcatcagcagcctggagaacagtcactcttccatgtgctgtgcattttcctgggcatttttcacctcacaacagctctaatgaccttggcatcaagctcttactggggattaataactggctgggcttaatggtccttactgtgtcccgggccattttcccagccagccattaattccaggcagtgccctggactctggtcattatggttccctgggctgagaggctgcccagtggcaaatggccacagcctcctctgcagacagaggtttccacagcctaccaccctttctctttgtggcatctttagcaaggcctggggtttacagccaaataattggttatggcatcacattatgtctactttgtatgtggcagcaggtaggtttctcagaggatagataaggcagggggttgggtttcattcactcatttattcatccatctattcagtattaattaaatgatttttcttatgagtcaggatggaagagagactactaatctaggagtgaactaagatagatgcctatgtttcctaagaaggaacagagtgtctcaccaaatgaggctttacggaaaatgttccaaagaatcggggaggctgaacactatgaggaaaaagtcagagagaaggccttgctcagcggagagcccgctggagccacctcccctcttgtgtcttcggcagtacatcatctcccaggccgacgggcagagattcaagttcacctccctgtgttccacttagtgattcatcaacccagcatctgaatgcttaagggaagaacatgtaaatattgcatcaggaatcttgactcaccaaggcatgaatatttccacccatatcattaagacactaaaggttataatggtactgagagtgtgggagcatgcttctctcagaggactgtaccaaatcatgaggaacagggtcgcacaatttgtacaattttttgccattctgcctcctaagatatcatcagtccccctgaatacaagaaacagacttcattttgtcctttggaagtgggtcagcctttagtacatgctcttctcagctgctggaattgtaacattatgtttagaacagctattgtcattttattggcacgccttaccaaaagcacctaaggcatacttcagacttcgatcttttttgcattgtttgatgcatctgcacaactcaaagaacgagtgttagtgtctgacataatcaataccagagctcagatttctcaggtagcagaaatcaagagggtggcttttggggactgggtcaacctggcatgttctagtggtgcccactaatcacagagggtcagtatggcaaggtcaggaaacttggccttctcggaaagagtgttcagctggcctgctctgggcaaagagaaaagagagagcgccaggtccttggaaggcccctaaggcgatgtgtttcacctgccaaccagtctctgttctgagaatcaaagcagaataattaattaaggggaaagagatgctactgggacctttcttcagaatgttttccctagtaataatgactacagtaaaattacagatccaaccggaaaattcaggataattctaggtgagcgtgatgagaaaaagcagcttcccatggccttagggtccactgggatgaacttacaaagtaaccttattaagcaaatgtgctgagttacacagaacctcaggggtgtattaagtcctcagtgaaggtctttagaatgaatgaacaaatcaatgttgtctggccacaagtatttagtgtcaaagtcagtcctgccatgctccaccatcaaccctctgtcaactctttgcagtcagctgtggtctctacttcctcaatccgaccacgatcacactcttgtcacttctgttcagctgagactattttggccgaagtcatcaaatccaaagcacatttcccaagtcttgttttacttgtcctatgacactgttgactacttgctcctttttaaaattgtctcttctgctggtttccattacataatcctttcctggttgttctctcacctctctggctcttctggataggcttaaatgttccctcatctttggtcccatggtcccttgtgcctaattgcattatagcacttacagcacagttctgtcatggtttgtctgggggcaccctcaatgtggactgtatgctcttttattgtgttattaaggttggcgcaaaagtaattgtggttttggccattacttttaatggcaattagttttgcgctaacataatatctgtagcaccaggttcagtgcctggtacgtaataggaatttcaccattgaataaattatcatggaactcttccctcttcatcatttatgtatgggatgtgcaagtaaaataagggaaaggaaagttaagcatttcctccattttttggccactgaaattgcctctcatcccaacagttcgcccagggattcaggactccttactccagatttcagtagttttctgaggggaataggggccactttctggacatctggaatgtggcacttcctaaagaaggtttggtctcaaccacatttcagcatcatgtacttaatgttctagttagatgaatctatttcaaatgatcctccaaggaatggaggtctttggtagaagattcttgtcactttactgcatccactgagcccagtgccctcagagtggtaacaacactactgattaaaaaatagcatcactgaatttctaagaggcaggaaagaggcaatgaggtaagaaaacatcccataacactgattctgcttattctactgcactgtgttggcatcatggtgaatccctttgtctctgcagtcaggtttcttgggttcaaatttcaacactgccaccgccttacagtgtgatcttgagcaaactgcttcatttttctacccttcaatattctcatttgtaaaatgggagtgataatatactatcttagagtattatttgaaggattaatggaattatatttataaaaaatcagaacagtgcctaacacagttgtggctgaaaagcactcagtaaatattaactgactggccagttttcctttgtgcccccagctttgctgtgctctccacagccccttactccgacttcagcagagcctcctctccttatactgtatcacactgtattgtcctcctttactgaccactgtccctcactaaagtgtaagctttcaaggctatttgccccatttttgcattctgactgcctagcacagtgcctgtcatgtaagagtaattagatgttgggggaattatgagaatttgcaatggtagaacctccatttcataagccctgcatcaattataaaccctaagtgttcactgctgatatcgtgagtacttattgtacaattactttatggacccctgcattctcttctaaatgggtgataggaaccctggacaagagcaaaaggctccgcactgaccaataatcctaatagcacctaacatttagtgaatgatcactatgacaatcctatgctaaaggttcaaccgtatgcagttgctatttttgcaggccaaatattggcagtttcaaagggctcaatcgaatacggtatctatcttaatttttttttattctaccatagtagaatgaggttttaacctcagttagagatgagaaaactgagacttgtggaggttagtgtcttaccaaggtcccacagctagtaggtggtggaagcaaggctgggcccatcctgctacatcccagagctgatgctttgaggcaccacaaggcaagggaagttggctgccctcgggtgctctcagtgtagttctgaagacacagccatgtctcaggaaactcccaaaataaacacaaaactgaatatatgcactactaagttggattcaatttcctgagacagtacaggaagccagcgtgtcctgttcaaagttaacagagaagaagcgcatagactctggaaaaaatctaacaatgcaacatcccttcagaacatcttgttattttcttgtacatttgctggccttggcctcgggccgtaattacattatcttcaaacagcaactagaaatattgctcattaaacatgaacacgggaatgtttaatttgttaggacgtaggtgttttgaaagcaaatcattggttcagggcattgaactgagtgctgccattggagttgtctttggtgaacaccatgtcctggccagaactttgccatgatgcgtgttcactgcagatgagagaaggacctaggccctgcaattcctagctggggtctgtggctctgagcttgacgctttctttatgtttatgaaaatgggacaactcagtttctctccctcatccgttaaaatagaagaagcaatcctaatgtcacttcaaaattatggcctctaaggggttacaatcagcatgtcatttcccatatgatgcttagatgatgtgtatttggtacaaacatatttgtacagcatccaagaattttaatcaaggtttaactttcaataaggtgagttaagagcatcacaactagtgtcacagcaatttgcaggatagtctttgcttcaacttgggagtaactttggactcaaaaatacctagttttgaaagccggaagcacaactttattactggctaggaataaagggcaactttggacaaatttgttaacatctctatgcttaagtatcttcatctgtaaaatgaccacgagagaaaccttgctgggttgatgtgtcgatttggttatttaatatcagtaaagcccttagttcagtgtttgacaggtcagtgctagctcccttttgctcttgtccattgttccctgtcacccatttagaagagaacgcaagggtccataaagtaatagcagaagggatatactctgacatgatggggaggagagaagagatgggtgcccttcttcaaaggcagggaagtagcctgctggtgctgagtgagggttaagccctttgcccctgacagtgtccttctccccctgccttccagcccctgaaaatgcactgcagggactgtgccctggtgaccagctcagggcatctgctgcacagtcggcaaggctcccagattgaccagacagagtgtgtcatccgcatgaatgacgcccccacacgcggctatgggcgtgacgtgggcaatcgcaccagcctgagggtcatcgcgcattccagcatccagaggatcctccgcaaccgccatgacctgctcaacgtgagccagggcaccgtgttcatcttctggggccccagcagctacatgcggcgggacggcaagggccaggtctacaacaacctgcatctcctgagccaggtgctgccccggctgaaggccttcatgattactcgccacaagatgctgcagtttgatgagctcttcaagcaggagactggcaaagacaggtacaaaggcacagggaagaagatgcaggggagggtgaggataagtcatcactggctgactcacccaaagcaaagcttttgctacaggcttttgttgtgggctccactgctcatgtcattgctagagttcacttgtagggtcctctgcgtgactgggctgctcaagctgactttacaagacaaagtgaaaagaagcatggagataattatatggatatttcagggccttatttttgaggaagaggctacacagctcctggccttcattggttaaaagtgcagtataacagctttattgcatttcattttacttgcataaaccctcaccaaaaaaaaagtatatgggtttattttttcccattcaaaggcaaacatttatttagtcaaccaatatttcttgagtgcccactacttgctcatcactgtgcttggccctggggaaacagtcaaacacaagtatataaagccttggacacttaccaagtagtagccagtgcactgagggtcttgagagggaagaaaatggtgctgtagatgtgccatgggccctagcccatggaaacccaaactgttagctacaactccatattaagacacgaaatcaatgtagtgaggcactgaaagattttttttctaaagtaatgggaagaatgggataaaatggaacagagtagaatagaaaagacattatcagcattcatcccacatagtaagttaggtaaggtattgtttcatgaaacttttatttcagtttgatagagatggagatagatggatagggatttcttctcaaagtgatgaaaatgttctgaaattagtggtgatggttgcacaatcctgtgaatgtaaaataaatatcactgaattacacactttagaaaatgaaattaaaactgtgtctgtgtgtctcaatcatgatgtaaaaatgtatttttcactataggttgaaagatttggaaattactggtctgggagataaggaaaatgctttctcaaaaagatgtacataagctgagacccagggcaataagtcttggataaagtaaaggacctggggagtgggagggagaaacctccctggaggtccagggaatcaggtgtgagagaacatgcagtgggttggagaaaagccccctgtggctgcagtcaggagaactagggggtgggggtgacacaaggtgaagaagagaggtgaaaagatgtcagctggacaaatctaggtgaagaaaggacaatgaagaatcaagggccactagagagtacagctctgggttggaactctggctctgtcactctctagttgtgagggcctggacaagttatctaaccttttagagactcagtgaccttacgtgtgaaaagggaatagtgactactaatcgctggatggactggtctaataatcaaattgcctcatttccttaattctaaaacctgtactttcatacgtttgtgatgtaatttacccctcttacaaaaactgttactgagtcaattgcttatctttaaactaaaggagagtcagacttagtggtgcatgcctataatcccagctacttgaaaggctgaggcaagaggatggcttgagcccaggagttcaaatccagtgtgagcaacatagcaagaccccatctcataaaaattgttttaaataaagtgatatgataaatgcaataaagaatataaagtaataaatccattctttggctagcagctcattattagagaatagtctcaaagaaagacttaagtacagtgcccccaaattctttgtgtggaagagctagatagcttttaaatcctagaaaccttgtgactagtcaaggactgcaccaggcaggaggcatgggtctggtggaggaaggagaaagagctggctgttggcactgtggccttcctcactggaaggcccagcagaccccatgggcagcccagccagcagatcacattggggattctgatcatcatctccagctgccacaaaatccagtcatgcattgacctttgcaactcacagataagagagactgtcactcagttgaatgagttatttaatcaagaaaacattttataaggaatcaagaaggaggggaattatttagtttcattttttacttgttggaaaatttgaaataagtagaaaccatctcaatagaaaacacttttctcttttttagtttaatggttgattgctaaataagtattcctaaaacactgccgcaatgttagctatttagtataattaaacattgttctggactccttgagaaatcattttaagctgataagttagatactaagtcatcataccctttggccactcaggatctttaggaacccttctcacagcaaggcatatcctgctcactaaattcactaaatactggccaatgagaagctttttctcaccaggtctttcttcctggtcgtcctggctggtacggagggagccaaagctttgtggagtggctggtgggactctttccacagacatccatctgccagggtccacgtagtccctactcaggggaatcacacttatgaatgtggaggatgccagagtacactgctgcttccagaaactttgtgcctcttgccttcgggaaacagtcttaaagaagccaatactctattgacttaatattctttacctgtagcctgctccaagctaaaagaaacaagtcagaaatggccattcaggacaaaactatttctgtaaattaaaacctaaaacatttagggtgtaatggtatttctcaatgtatgcttttcttcaaacccaacaaaacagtagcatatgatacataaagtacagaatatctaacttgcagatctcatgatcaggactttccttttgggtgaatattttgaagaaatagggtcatttaatagattgtgattgatagaagtttcaccctccttaaaagtggagaaaaaagtggctcaggaacaatctgcaattaagaagcatgacaaatgacttagatggccaagtggtattctttgatattaaaaagtaactgtacttgaaaataactttataattgaataagggtacattaggaaaatatgattcagaaccaatattatagtaattagataaaggaagcgtaaatgaaataactgcaggaagaatatttccatagagattataaatgagattctggtggagcagaaaggcccttaattgtaatttagtatgcactatagaattatcagctcagtgtgttacttcatcatataaaagaatatctgataattttccctaaaaagcacatgacagctcttcatattctttcattacagctgattaagtgtaaaaacagtagatattcctttgttagaaaaagagttcaacaaagagttttagaaagacagcacaaagtgttgcatttctatagcacgtgaccccagaaggctgttatttaggaagtctggggaattttaagtgttactttaaagaactcttcactttagtttctttcgtcctctaccttgcattcttttccccattttacccacaaagccttttcctgtgcagccacatcctcctgtattcaggctgtggtttacaatctctactacatcacataaaacagaaccagagttatgggagagtttctgcccttggagaaagccccctttggtgtgtccaatagctctaaaagcagagggaatataagtgtgattcccagattaggctcctgaagctgtaagtgagctgtcatcctcttcctgggttccacatcctcccagttattcactcacccagattaggtctagaacacatggccagtgcattgtcgcagcccataggtgaaaacagcttctaacttaagggaagccacttcctcttcttaccctttgccattcagtcagctcttctccattccagctccttcagtctcaaaggtcttatgaatatatagccttagtgagaaagaaggaaaatcattaatacctatgtaggctgaaggcttctgaatttcataattcctgccctgactactgatggcagtccctacacagcccccagtagcagaatgttggaagaattttcttcatggttgctaaaaagcaccaaaaagaatggtgaaattatttaccttgattgctcaacctagaaactaaaagaggaggaagagatgtcaacgtaccaacataccaaacttggtgcttttcatacatgcttgcttatttagctctcaagtagcccaggggacagagattcctatgcctcctttatagataagaaatgaagggccaaagatcaacaataacttgcctcaggtcatccagctggttatgatagaaacaggtaagattcagcccacttattcccatctttaggagcttttaaatatgctttctgggatgttactaggtcaaaatacaatggaataggggaatgaatgagcaaagggcttaagaaatagaaagttgaagccatgatccccaggaataactaagccacccatgctgtcaggtattggacaaaatgaaggactccttaaaaatgtcctctctctatttttttttcttttttggtccttatatgaaatgaaaataatgatgcaaactgatagacagaaggttttccttcttctcaaggatgggtgccacacagtgcaagtagaaaagccttcctgcacctctgttattcacatcacaaatgatgctatggctgggcaaagtcagacagtctgaccttggggataaggtgtttgaaactggctaatgaggcatgccgtaagtactgaaggaaaagtaaaagcagcaacccccgaagaattgaaattaatatccacagtagtgtagcatggtaggctgagtcattctcacaggatcaaattagaccttggtgttatgtctccacagttatcctaaggtgtagcatatggtagaagctcattacagatgtctgaatgggaaaattaatgaatggtggggtgcaccagttcattccttaaattttgtcaatttttggtctcctagtaaaaattttctgatatgtaaaatgaagcaaatgttcagttaaatataagcattcctgtggctcttttcctctggtcattagcccatacccaaatgagtgtacccttcttacggaaagatattcaatcaagatgttggtgttagtctacttgaaggcaagctttcaccctaagttcagtcaatcaaccaattgactaatagatagataaatacatgtgaatgtttatttatatttaataagctactcattatctagcctgtttggggaacaaggagaatttctagttactcaagtgttctcgttaagaaagagttgttaaacgggggctgtcataagaaattgagttgtggtaacatacacttaaacatttaaacactgatcatcatctttgatgatgcagaagtcccttgagcatctttcattgtcacaaattcagcatgagcattaacatcaattatgattgtactgtggaatatggtaatgttagtaagagatgtcaatttgataaagttccagatatttaccaaatggaggagagagggagagactcttgtttatagttagccttactctaggaaagaattaaagatggtagtgggtataatggttactttaccagcttgcagacttaattattgttccttccaggaagatatccaacacttggctcagcactggctggtttacaatgacaattgcactggagctctgtgacaggatcaatgtttatggcatggtgcccccagacttctgcaggtaggatttattctgcaagtgtaaatcatcagccgtgttgtgcaggatttataaatatctgattctgaatatcaaccatgaaacatgtctaactgtcttcttgaagcaattaattagcatgtcccaagttctcattctagaaacaacaaacagcatttaattatgttatataaaatattgaaagtttttgtttgtactgctggagaataaatccatcttgtgggctccatttatcctctgaatatttatcagccagaagtaatgcaataattggcataatattaacgatgaacaagcattaagaaatattagttttactctcatttcaaaggaatgtgataattttttaatgaattaaagagagcaattcctttgacagtgagggcttttttctaaaattaaaatatttctctgagcctccttcccttgccacatcagtggcctgggcttgcacttctaaggccaaaagcacaggcataaatattttgaggtgtcactttaaagagaacatgcatacatctctgttgccaccttaactttcctcctggcatgtgcccaggcagagttcagggcataccacaaatgcactcagcaatattcagggcctgatttttggaagcctgcttgaaaactcgcctgtaatttaaaatagtgagaccagaaattccagaaagtaccctagtttttgggaacgcctgatggcctgcacatggactcaatcctgattttcaaatggcaaaagctggggtggggggcatttaaaacttgctttttaaattgtgtgcttacttatactatctggtgttttatttgtttattttttctaacaatgtctcgaaggccatgagtctttaggcaaaagctgcaatttggaggtttaaagcaaagatgagaaacagcatctaatcatcccattaacattttaccacttttctctctttttaacccaaagatccaacacagcaacaatactaattgatatggaagagtcaggccgcaaaggaggagagagaggtacagatagagcagacctttgatgtaaggtcagggtcaaaaatgctggggctaggctgcacaggtgtaaagcctggcctggtcacttacccacctagtatgaccttgaagaagtcacttagtgtctctaggtctcagcttcctcatccatagacgtggatgtgatagtaatagactctgcctcaaagggctgtaggcagagtaaataagctaatacatgtgaaatgcttggaacagtgcctagtaagtacatggcaagcacaaggcaagttagcttggatcctcacccagtgctgcctcacttaattcactggccctgtgtccctgtttaacaatctatacacaaaaagtaagtagaatggcctaaaaaggcaaactgcctcctcaaaccaacaggctaacagagacagtgagaatggcacttatgggcatgcaaagagccatcaacgttgatgggtatacagcagatataattatgcaatattgccattaggatgccagaaagaaaaagcatgaataaattgaaatgttaatgacttcaagtgttcaaggaaatattccatttattatggaaaacaaatgaaaggcaagttaacctgtcatttctcctactcagagttagttcatcatgacttcatgtacggtaggatcgaaacaatttatggaaaatactaacaaagaaattaagataatgtcaatgcattacatattgccactggctctgagtttctcttcctaagctatcatccccaaagctttgatagttgtttgcacaagacagtttcagcaagaactcttcaaaaggacccctacgcccaagttctgtcagagaagtgaagagtgtcatctggaggaaaggttcagtgctggagagagcattctgctcagtcataaagcctgttaaaggaaggttaagaaggaagaccaggagtagcacagatggattctacagttctattcatctgcatttccaggacatgttgactggaccaccaggcatccagtttcgacttgttgggtcttgaggcttgttttccttgtttgtaaaatggggataagaaaataagaagacgaacaagcaggtcatggtgagaattaaatgagataatagatgtagagtgttggatgcagttcctagcacacagtattcaggaaagagtatcaatatcattaatattaataagatatgtaaaataatttatattattaatattatcccaagcacttgagagtttccctgaaagataccaagaattctgagcagggggctggttcacaactataatcccagcactttgggaggctgaggcaagcaaattgcttgagctcaggagttcaagaccagcctggccaacatgacgaaaccctgtctctacaaaaaatacaaaaattagccaggcatgatagtgtgcacctgtaatcccagctactcgggtggctgagcatgagaatcgcttgaacctgggaggcggaggatgcagtgagccgagatcattccactgccctccagccggggcgacaaagtgaggctctgtctcaaaaaaaaaaaaaaaaaaaaaacaattttaaggggggcttcaaagacacagcttcttgcctcctggaggcttataataagccttacccatgccaaaatataaagaacacagcaaagccacttaccatgtgactataaaaagatgcagcttttgcaatcttcatctaagagttaaatgagtctgtaaacagtaccttcctcaccaccagagaatgaaaaagcaactggtaggctagtctgctactcatttgaccattccctcttttatctttattttgaaagaagcagagaactatttggggctgaaaacatggtacatgtatcatgagctctatggcttaaggaggtaagctatcgccagggccaaaaatggttgtggatggttttgtgtggtggcagagctcacattggctgggcccattggaatatagcctccctgagggcagagttctgtgtgtttacttcagtgttgtagacctagaacacaggacagtagatatttactctcctggcatatggcagatacttcataaatatcaagggaatgaatggctgtgtcctctactctccgtagtgctatagtaaagggtgttgtatatggataaaaatagccatttctgcctctcagaaactctgactttgagaaagttacctgacctcactgagccttagtgactgatattgggcaagctacctaatgctccatctcagaagccttacccacaaaatggtgatgacaattatcatataaactctcttgcattgagagtttatacgataattgcatgaagtcatagatgaggaatgcttagcaaagtctcagggcctgttcagtacacagaaagttatggggtgaaaggattcactgatctgcagttgtggatgctcattggcgcattttacagaactggcattatgtggcctccagctccttgcaggacatctcatgggctgctcaaagtgtgcctggcctttctacagcttccctaagttcccagtgtctcactgcaatgaagagctagccacgtggagccagatttcagcaggcaaaaagagagccaactcttcagtttgggcaaattaaccatttcagaccataagacaaaattagtaccctcaaaaaagtcactaactaaataaaccacaagccttttattcattcagctaactcgtgttgggtaccagggaggtaatcagagatgaatgagacagggtctctgccttcagttgcctgagactcagttgaccacaattaaatcatgaggtacagaaggttactcgaggtgcctgtgggagaagatgttcactctctgcctgtcagcagcatctgacccactgagctttattggaccatctgtctccaactttcaaactggactcagagaagtccttgcattccactgattctatcaggtggcatagggataaggagccaggacaacaggaatattggacccttccacccgacttggtcaggggcagacccagttggctctgtttgcatctggactattgtataagatttcttttcaacaaaagagcatttgacaaataagaactttaacaacctctggtctaagacacaaccatgatgctttccaatctaaatcaaactctttcacacttttcaggagagtagaatcatcaccttattattgtcccaaagagaatgtaagctgtcataggcatggtgtgagggagcagaggcagtggggcagagagagaagggctaaattatatcttgggggagcaaactgccaagcaatccgtgagtgcctgatccccaaggggaagtgtaggtaacctggagagtcatttcccatcaggtgtcctggaggtctgccttctcatctcacccaaagggcctgagttacttctaggagtcagtcattggcaagaaaactaattgtaccccctaaaagtattaagcccatggacttcttaggaagaaagatagcattgcattcacatttaaaaccccaagtggaagtggtgggcatataaatggccatggtggcagatgacagacatatctcattcaagatctggcagaatctaactgactcaaagtcatttgaatggcatgcagcatctttcatttggtactgtgatggcctcctggactgctctctccatcacttgtcttcttcctctccaaacatgactgccttactagatgacaaatctgactgtgaagagtcacttaaaactcctcagtgacttcccaaagctttgtgagcagagttcatactccctagcttagcacacaagaccttcaggatagggcttctgcataccactttagtcacatcttctctactgatgcatttatgtgtttatttgtttattcaaccttactgaaaaattcataaaggaactcaccctgcagacacctgttcctatgacctcagtttggactgcccatcccctacttccttaagctggctggttttccactggctctttactaataacattaatggctgatatttgttgtgcacatacttcatgctggctctgtgcttaacatgaacacatgcattattttcttgaaccttataataatcttatgaggtaagcatcattaatatcaccattttacatagaaggcttaaagacatgaaacagctgcccatggtcatagggcaaataaatagcagagctggaatttgaatgcagtctgcagggctcaagagccaatgctcttaatccttcagttcattgtttcagatacagtggcccttctttctcagctctccttagccccctgtctgagtcagacctactgggcccactgggcatccctcttcctctgccttgccccatctcactgattggtttgtccatctcctttgtttgactctaggctccttaagaggagggccctgtctcaatccacatttgtatcattagcacttgtcattgtgtctggcatagagtgtatcttcagtacagattagttcaatgagaaacaaaaataagccctgtccatgggggtgtttaagagattgattctaaacgttattattgcaagaccaaaagtgccaggcacattaaaactataactagcaaattcagattttgagaagtcaatgagggccacattgttttattttcagccagagccagctctgggtactcaaagaggggctcaggcatcagcccccatcctgcctgtatcaccagacttcaggcacatcaaagttgagaaagctggagaaaattaatgccatgttgcaccagaaacagcatcaaaatatattattcagtggacagtggactcttaaatcatgccatatccatactgtaagccaaattcattctctctagatggcctataaattgcgtgaaaagatctgttgtcgttgctttccaaactaagttatgctaagtatttaatctcattttccattataaattatttgtgataataatgggccaagcatttaaattctacctaataatcttatttctggtcatacttagcacattaccaagtttacaactctctgttacccaccatttcttgagtattaattagcggggtaatgattcagagtgatcactgtcatggaactaaattaatatctcatccgcaatatgaaggacatctcaaaggtatcatgaatatcagagagttgatgctgccagaattattagctagcgaacattaataaagctgccagcctaacagggaaagttcttacttggcgacagtccaccgggtagaatcggaagcttactcacagaagacgggtgtggaatggcaatgccgcccatgtggtttatgttttatgaagtagacttaaaatatatggttgtgtttctcccagggtgagggtggggcttgagtgattcactgtggctctttgtcccatgaactgtgggcagctgcaggctcttggtgctccatgcgcctagacacacaatgctattccatgggcttccaaggtatacagctcttttcctcccataagaagatccaaggaccagaaatcaaggcagcagaataagggtggctcagggcacctccaggactgtgacagatgcttgggaaggactgctgcaggaatgttttcttctcaatgcctcatagtgtcaccaagcccccagagcaagccaattgcagaacaacctagcagcttcacagctattaattcaactctattctctctattcttcaaacatttcctgagtacctactatatgccaggtactgcaccaagaatagaaatgtgtttaaagagagtgtctaagagttctagagagaggcaaagacaccattctttcctcaggatatttgcagccttctgcatagtccagccccaaacccagtgggcagggttaacctagatcacactataggagagaaaaagtaatttcttttcctcatccatcataggttctttgctgagactcctaggaaaaaaagacagattaacaagagaaaagcatacacatttatttaatataaattttacgtgacaccagagccttcagaaatgaagagccaaagaaacagggagacctccttatttttatgctaagcttgatgaggaagtggatagctgtgaagaagtaggattggacaaagcaggtgtgatctgatggtaataaaccagggtgggtgggaggaggtagcaaggtatgtttgttcagattcttttgacatttccttgtctttgaagataaggatgttcatttcctccggatatatggagggtacctctggaatgaaagtttatgacctgctttagacgagggcaaagaaatcttttatgaactgcatcagaggagaacagtgaagggaggtgaaagtgatctccctgcttctgttgtttcctcaaatgccaaggtaccatattttggagcaacatgtcctaaacctcgtcagtacccagaaatggaagtgtcttcccttgcttgttagggttatgaggtttttttcagttgtaaaacttagctttagaagagtcaaaaagtggaacattacaaacccctgttgccattagcaccgatgggcagaattgcacatgagcacaaagcctctgtttaacaccctgagcagctcgcaagcaccacacatggggctcctctgtagcaagagctcggaggaaagcggcaaggacaagctgctttcaaccacacactgttgatcccagggaaacctgggtgccattagtacagaaaccccacctgggggaaaggagtttttccaagacacagaacctcactcttaagagtacagagtcaactggagtcaactggctttggtccaaaccttggctgcgaaacttcagtttttctgtgcatgagtttcctcgtctgcagagtaggggtgctaatagtagctctctgctatagtttggatatgttttgtttgttcccaccaaatctcatgttgaaatttgatcctcagtgttggacgtggggcctagtggcaggtgtttgggtcatgggggcagatccctcatgaatagattagtgccctccctggggcggggcatgagtgagttctcactctatttgcccccaacagagctagttgttaaaaagagcctggcacctccccctttctcttcttcctctctcgccttgtgatttatgcacatgccagctccccttcactttctgctaggagtggaagcagcctggggctctccccagatgcccaaccttgaattttttgagacatcagaatcatgggccaaataaggcttttttctttataaattacccagacttgggtattcttttctagcaacacaaaatggactgacactgtcttataggggtgttgtgaggactaaataagtgagtgtatgtggagtgctgagcactgtgttctgagctgaaatagtcaagtccagcagcttggatggacaataagtcaggttgtgtgctgaaagccaggcagtggactgtctccctgggtatcagatgctccctatcaaatgggagctgcaatacttgcctcagagggctgatgaggatgtaaaggagatcacatcagttaagcgcagaagctgagcaggtacttacaaaatcagttgtctcaaacttagctgcatattagaatctcaaggagctttccaccatttgaatcttctaaaaagctttgttgttatgatatgtattatttaaaaatatgtttatttttgtttcaaataattttagagttacagaaaggttgcaaaaataatactgagagttcatataacttttatccagcttcccctaatgcggatttgcattcctatggtccaattatcaaaagtaagaaattaacatgagtataatgctcagctaaactacaggcattattgagattttaccagtttctctactaatgtcctttatgtcctccaagaacgaatccaggttccctttgcatttatttatcaggtgtcctcagtctctaaatccatggccgttcctcaggctttccctgcatttcatgacacttttgatgaggactagtcacgtatttcatagaatgtccttcacttggggtttatctaatgttttcctgtgcttagattgaggttatgcattactgagaaggataccacagaagccataggcccttcccagaatctcataacaggaagtatgtgatgtccatacgtcttattactggcaatgttaaccttcatcacttggttaaggtaatgtctgctgggtttacctattgtaaagatagtatttttccctttgtcattaataaataacttgggagagatactttcaggttatgcaggtagcctatttctcctcatctttttccccattaatgttctgttcatttggtgcatcttgcctgcgacaattactgcaacgttctgaggatggtttcctagtccctcattttttctacattgtttattggaatttttctgtcttgaaatgctgtttcttctcctccatttatttgtttatttattcagttatttattgaaattatcatggactcatggatatttattttattttattggttttataatccaatactgacattgtttattttggttcaaacctaagacactttctaaaatacctgtgcctgagttcctctccaagtcatccgaagcagagtctatggggttggagcataggtatttccttaaagctccccaaccgcactaaatgttagttccctcactctccccacctgcttcctctaaaaagaaaaaaaaattcttcctcaaatcattctgcagggcttgttctcaaactggctgtcagagtgtgcatggcaggctgcagccacttggggaactggttctgtggttatctccattcctgcctccccagcccgcatatcctttccttcagctcacggggcccacaatgggaacttgagtaccagaattccttttacaactgcttcctcatgtggaaattccgctgaggtttattgtagttttcactgaggtcaggtgaaggaagaaaaaaactagggcagtctttagaaagtcaggtttgagaaaagacccaaggaagtatgaccttcagctaggagtgtctttctaaatggcatagtgaatttagtgaattccagctgatggcaggctcacagctggggtagatgttcctgcagtttccagcgctgccttctgagtcccagaaagcacttttctgctgcttggacagagttttaacatgtggaaacaactcgcttacatgaataacttatcttgacacctctgaaatcacagtaaccaaatatgtaaatttaattctctttttaggggatcaatatggagtcagataagttttttttccaaagagatggtcttcctgaataaggaaattgatcctgtagcatctttagctggtttccaattgccccctactcctaggtgccgaatcaatcttatgatatttttagaaacctaactgtttctttagtcagattgatgccaataaaatgtccaaaacttagatgaatcaaatttaaagtgatttgtgatggaataaaagcttaaccccaagcataccatggcaacatgaaattggcatggttcccccaaattatgccatatgaatatgggaagatatgtctcacaaattcttatttttttcttcatagtggtcagcttcaacctgaatttttgttagaaggcattttttgtgttaaaaacaccttctattaaaattttaatgggattccaatttctagggtaagtaaattaataaaatctgcaataactagtcaggaaaggatccagtgtttcactacagaacatagagataattccaagacgggcatattagagatgcaaagtgttaattcagcatagcatccaaaccaggataaggaatgtttagatgctgcatgacaaaaataaatctctcttcctggaagaactttaacctaagaggagaaacagctcaaaggtttattgttgtcagagccaaaaacatgacacccctcttgataaaagacttcgatccctgaccccagtagagttgctactctaaaagctatttgtgtattgatctcctctgaagaaaacgaataggtgtctggcaggatgagcatctttgggaaaccaagttattatacttagaggagagcccaggtgaccaaagtgggaaccctagggcatcaggctctgaaagatgatttgcaagatgctgggaagcctgggccttttctcttcttagtctctgcaacaaggccagttgctgagcatagctcaaattaggaaagtttgtctgccaagaaaccttgactaatcttaccattcattcttcaaaagacagaagaggtgggctagactggcctgttttagaaaccagtctgagaccaagactctttagtgcgtaaatatttattaaccctcaaacaagggcacctaccacccccacatgttaatcctatgcacaccatcttgaagaaatgagccagtacttcctgtttgaggctgagacagagatatagaggcagaaaaacactcggagactctcaggccaccaaacaaggactgaggatgtagagtttctggactaaaagactgtagactttgagtacataggccctctgaagcatcaaaagaaaaatcgtggcctcttgtttgctgtcttcctttttctcccataggatcaaactaagatcatcaactttccaaactcagagaagaaatttgcgtttagctgctaattccatataaatttagaagtttgctatttagctgctaattccatataaatttctttcaacaacataatttttaaaattatttattaagcacctaccagggactgttccaggaataagacaaaacactgccctcatgaacacccaataaacaagtaaacagcaacaacaattccagacagcaattgatgctataaagaaaatgaattcaagtgagatgaagtgaggggagcaagtgtcaggtaaggcctctcagagaaggatattacttgagctgacacccaaaggtgaggagtgaactcagagagggtattccaggcaagtgaccaccatcaagtgcaaaggccctgaagtagggatgagctttgtagagttgaccagaaaggccagtatggtgggaacatactgggaatccacaaggctgggtggattaggagaagacttagaaggggagccacatcataatgcatcccagcagccatgctctctgtataactggaagcctctggaagcttagtggagtggggaatgggaatgacatattttgttttggtaatatctctgcagctgcttatggtaaatagactgtaagaagagtgaaaacaatactattgttgtgacttattaatatgtagggtctaaatctgaggagactgaatgttctgcagctcattttcaatctctttgatgaaaatgatgggcactgattttatttcacaacctcaaaacctctccacttccttattgtgtaatcagaaaaaccatttgttcaaactcatttaactagaaaatacaatttttatcagcttattaaagataacatcttacctcaatcagtcaaaggaaaaaaaatttttttgctttaatcagttatctcaatttcctcctacagggatcccaatcacccttcagtaccttatcattattatgaaccttttggacctgatgaatgtacaatgtacctctcccatgagcgaggacgcaagggcagtcatcaccgctttatcacagagaaacgagtctttaagaactgggcacggacattcaatattcacttttttcaaccagactggaaaccagaatcacttgctataaatcatcctgagaataaacctgtgttctaaggaatgagcatgccagactgtaatcccaggtattcactgcatcagacaccgagacactgaacttcctgagccaccagacaggaaagggtagcagaaaacagcttcactcctcaggaagtaccatggacagacgcctaccaggggtgacaaagcagtgcagttggattgtaaggaaaaattccggaattaatgcatcctaatgaatgttgtccccttcaatggtgttaccttaggagctgaacattcaattcagttacaccactatgactaaaaacagtttggatctcttagtattgcctttgaaactgcaacataagcaactcaacaatattagttgcattcctttatagacataccatgtcaaagacgtttttctatcaagttgtattctttcctgttctataacctttgtcatctgttagactctgtatgtgtgatttgtaaaaagcaggctgaaactatggacatgatttctgaagagcacatctccactgactttcataaagcaaatgtccaatatttatttattgagagttttttagtgcaatctgggccagtatttttatagattatgattatgtggtaatttatccttcctaactctttaatcctgaatgatggttggaaatggcctagaattaggttactctgttcacaatgctcattgttagcatgcaattggtatttgacttggaagtgttgtgttgtattttttgaacccctaggcttcaggaaaactgctcttttgtaaaaagaatagcgatgacattttctaatgtgcagaaatgttccaaaaggacaaaattgaaaaccaaaaactatgttattaaaacaaaaaaatgctaacaagagaaatttaaaggtagttttctttagtaataatttatgtaagtgtcctctcttgagccctagtttcctttttggcagaatgatgtcactgtaccagacaacctcttaggtttcatcccaaatctaaacttgtggcctcttcttgacccatttgaagactctgcacttggagtgatggggccccaacagtagcaggaactttattttggggagccttatctacattcatattacttatatcactcttgtggttaaaactacacttcttcctgtgtccacatgggctaaaatctaccccctgcttctctcgaagcatcaccatccgcctcttccccagcctctcaacacaaaaacacaggatacacacacacacacacacacaaaagacatagctccaaggggttccctggctacaatagcaaacagctgcccttctgtgaggaaaagagactacaaggacatgccctatcattcaactcatttatgctatgaactgtttagactcactacaaatcttcttagattatattcattaccattccctggtctgaaggagtataaaggacttattttattcagagccaagataaattcatattatagatttttatttaaacaagtaatattgttcaaaaatagtctcttataaatatactagtgttttctttacacatgacttagaaggcattagtttctctaatgccaaatttgaaggcaccagcaaatattatgtatgaagactgacattgttttacagacatgacctggcttatgataaaagaagttttatcgcattaccacttcttttcccttttcttaattagtacactaactagtactattaattacacggagtattgttgttaaaatgcaaacacaatcagggtactcacataacataaacaaagttgatattgatgtgtatggcttgggctgttcaaagccagtaagattgaaatggccgtccaaaacatactggaatatgttctttaagttttctcatagtttttaaagggactatgaattttattccaacacattgtcttccacagcatggactctgaacacatcatactttatcaacatatgaaaaagtgtattaattttatacaatttacttataggccacctttataatcacttgaagacgttatgttgctcaaacataagtggctcctttggcaatttctatatttgtggaaatttggaaaggcatagtttcaacatgcaagaatgtaattatattgcttcatctaataatatctcacatatctgtctatcttcagattttagattttctttattaaaaaaaccatcatggtagctccatctcgtttgtaacttctccctctcaaatactcagaagaatgaagaggccaaattcagaaaatcatggcttcactgggaaatgttttaaatctacatgtagctaggatatgtgatttcatattttttaaaaatgtggtgtaaataagtgtaaaaaattaccacttgcaaagtggttttattacagcgttaaagaaaatgactagaattctgatagattgtgctgatgaacctggttgtgggcaattgaattcttgtcttcccactaccatttcatgactgtcgtctgaacactattcaacaccattaaatataaactctgatataaaagatgactacagaaccatgtttatagacctcggtgatttcagtatctgattgtgtttgatgcctaagtcatactcgttatgttacatgcctttttcctctctcccagctgtgtcatcagctccctcctagcttttaagaccacagtaatacaatgccacagctggtcgatccatggcttctgttatttcaacacaagaacatttggcagaggccattacaatagatagccattatgggcaaagatacgggaatttgcaaacaaaatcaatcacttcaaatggcccataaaaggaggaatctcagatttaatattctacggtaaatattcacccaagaaagcatacattaaaagaacattaggaggtaaatattcagcatgctgcatggagacttagctgtgtgatttccattaccgttaatgggcatttggcaactaagtccctgtgctttgctaaccctggtgtgtactcctaagggctacacataaaacctgagcaattcagagacttctgaggtcatcagatttcagagtaagatcttttctttaaaaaaaaaaatagatgaaagcaaaacacaacgtattgtacctaaaagagaaatttgtgtggtctctcacaatccttaggttactaccagatttgtgtatcctttgttttctgaagttctctccattactgatctatttgaatgacatgagaatggagggaaataatctcattttgaaataaaaactcccctcaaaaattaaaattaccgacttagaagatgataaatgctaagtaaaagtagaaggagaaagttgaaattctattaggattaagacagtgttatttaaaggcacatgcacccatttagtacctgcctaaatatttgcccttgtgtaagagcaaactcatttcagaaatatatcctgaattccaccagggtgatggttcaaattgttaaataaacctactctgaaagaagggtccatgttcctattctctctctgcagtgttgggaggtgatgttaacactctacatgttttgtatctgacccaatcatttcttccattctcattgcttctctcttaaacctcattgtatctctttactgtcattttctcccaattgtcttcttttgtctacagtgtgctcctaaaccagcagtctttggtgctgttaaggtcttccttgtaggtttttaaactaaagatctatctgggaaacagatttggggtaggtcctgccagagtaatgaccatggtaggtgggaggaatatatctggctaccatacaaggtacttcagaagtaccattatggtttgcccagggccaagtggggagtgaagaagaggggtccccaagacacagacttcagtgctaaaaccagggaagtcctgggctccatgacagtggctcaccctatcagaaggccacgtcaaagagaactataataataagccctggggggcaggatgtgtgaaccaattgcctaggtgttagcacatgccagaaggtactttggaatggaaagaggtgagagtgtctcaaggtttaaaaatgagcaagtgtagcccctcttttgtagctcactcatcccaccttctcagggtgttgaaatgcaaatgcaaaaaggctgaaaccctgtttctttctactcagtgccctaatattatatactaccttgaattgtgcttcgtctttttatgcatgtgtcctgttagtctaattagattgtaagctccttgagggcagagactctttctcctttgtctctgcagcctatacctagtatagtgccttgcacacaataggtgctcaataaatgtctgttgttgatcatgacctcttaa

SEQ ID NO: 2 - DNA, 200067 bp, homo sapien
agttttaattctgtctctaatctctgcaacagccgcgcttcccgggtcccgcggctcccgcgcgcgatctgccgcggccggctgctgggcaaaaatcagagccgcctccgccccattacccatcatggaaaccctccaggaaaaagtggccccggacgcgcgagcctgaggattctgcacaaaagaggtgcccaaaatgaagaccctgatggtgagtcagttgtggcaactccaccgggcaaagagggggatccccgggctcagggtccacgggacgcaccgtggagactccgagacgcctaaccctgggccgcgaggtcgcctgttacaaagggacaactttctacccgctccgcgttccctcccgattctccagctctgcctggctcggaatcccagagccaggatgggaactcggggttgcctcgcctcctagatctccggcgagaggtccgagggggtggcggagagctgcaggagcgatggaggagtgggcagattgctcaagggatgggggtgcccaaaagcaacagcctgccaaaaactaagagggacggggaggggggacctttgcagactttcttcgttttcttagatttcaaacttgcaaggatcgcaaggatccagggccccaggaaaggaggggtgtgaaggactcaaaattccagcagcttggctggggtggctgcgccagacgggcccttccccaaagtgcaaacccacccctgtcctcggccccggcgcgctccctccctcagcccggggccgtacaccacctgccctctaccgagagatctgggcggcggcggccgaaagcagcgacgcgcccggagcatcccttgcgatacgctaggggacggtgctttctctgtcccagttgcgtgcggcggggctggggcccaggccgccccaaatctcccccactagagtgaccaccgcacagttgtccccgctgggcgcgctcctccggtgtctgcgctcagccgctctcctcttctctctcccgcccgcccgcagcgccatggtctggcagtgtgtttagcgctcaccaccatgtgcaccagcttgttgctagtgtacagcagcctcggcggccagaaggagcggcccccgcagcagcagcagcagcagcagcaacagcagcagcaggcgtcggccaccggcagctcgcagccggcggcggagagcagcacccagcagcgccccggggtccccgcgggaccgcggccactggacggatacctcggagtggcggaccacaaggtgacagcatgcccgccagcccgctcgccactcagcctggggatcccgcacacctgagccttccccctttcccggggctgggaggcgctgtgagtaggtgccgttcgaaggctggaggggagtggacccgctggggtagggtgggctagttccaacttggtatgaattcttatttggagaaagacacaaagttttgtagaaaataggggtgaggtgcgtggaccccaaagcctaatttcccagcagaaatcggccctggaactagaactccctgatccccagaattgcagctgcggatggaggtccggttcctgaagcctcgggtttggccgccgagtcgctgcctggtgggaggaaactggggttggcgcgggtaccagcctgagcgttcctctgacccggaaccggagggtgagcgcagccagcccgcggccactgctcgggatccagcgttcccctctgatctctccagcgcattgctttgggctgaattctctcagccctggggagtggtgcccaggcaggcatggaagacttgagggacacactcagcttccattggtttgaaactcatcattgtgagcctgtcttcctctgccttccgggaagctgctgcatggggtggctaataactaataagatgaattttttaaaattgggcctcctttccctggaataataaatatctggtttcagtgtgtgaagcctctgggagaatcctaatcaagtttgctgattctgaagatattttaatacagtttaaatgtatccgccattatttgaagctgctcgtatgtttttattaaaacacaattccactctctatctgctttataaagctagaggatttcttgaaatctcccaattattctttttattttactaaattttgtggttgtgaaccgaagtaatatatagtagatgctccttttgtgtgcaaaggtcactctaaccatgcgtgaaaaagccaaactttttaaaaagtggcattcaaaatattgccacacacctgtttaatgcataatgctaaggatttgaaaggtataaaagaatttaaggcaggacccagtcttacggatctttaaatacctgaggacagaacaatataccatgaaatgtgtgtagatggataaaccaatagataaaaatgtgtaataaatgctagatatgaacagtactgtaggggtgcaaaaatgagaacgatgacttccctggaaagatcaaggaaagcttctttgaaaaagtggaattttgcaatgagaagaattcagggaagcaaaaaaggaggaatcaatttcattaggaagtgattatttatttatttatttattgttgtggcaggagcaggggttggggggtaggggtgttagtagacttaaaatccaaaagcagaaggctatcaattttacaattacagcttttgtttccgctcttagttgttgattgattacatgctttgtatctgcatgtgcaagcaaccgataagggctggagttctaggaaagtttagacattagcttctgactgtagatggctgtggtgtttatgtgtaactggtgtatgatggatatactgagatcatggatttccatggctattgtttggtggaaattactgtctaacacttgtgaagctttgattaatggcagcatcaaaaggtaaatttgctgaaagttttgatcagcttttgggaagagatttctaatacttttcttcctgtgttcttctgctggacagacaccagctaagaatattgagagcttaatgcaaagtataataacctaatgcttatgttcaaaacaatgtttattgaccacaaatatgtttgatttcaatttttgtttatcagagctttattttattgaaacaaagaacagtccttttcaatttggagggcgggatgttgataccctacatgggaaattgaaatgatatgtagtaaaagggttttacaaattgtgaagtgctatatgaatgataaatattgtgtgaaagtcattggaattcctagtagaagaaggtctttggagataattatgaatatcaatgaaattatctcatggaacaccaacatctcacaaaattctatacccaaaggttttgagggagttcacgtcaccacaagcaaaggaagaaaggcatatcttaaagtctatgtcttctgtttagacattatcccaattgtcccactgaactaaatgtaaacttctcagaatgccttaactgattctctttaccgctactatttatctggctgcaaattgggcagagttcccttacagatggtcatatgaaggtgcatgtgtaaaatgttgtttatgttctctccaaaagttcctgtttaattaggtttatttgatatcttcctatattcttgcataggcagaggtggaagacattgttagaatattgctaggaatttttttccaattatgacaggggagggtaagaaatgaaagcctttctattcttattatattgccagatgatactcgattgctaatttttttttaccctcacatcaggcctcaggaaaatgatggaatatgctggatgtgatgaccaccaagccatatgctgctgcgtattgaatcagaattccaacagccttttttatctgccattgttttacatagtctggagagagttacagatattatttaggaaaatgttcacacctccatagctggaggccccaaagactgataaatatgtagtgtataagctcagttacatgatgttgttaacattaacagttccaagattaaattcaacaggtggtcctaatccccagcacctgaatttcacaaattacagcctgtctgcaatgatggtcttgtctcatatggctgcagactgaattactgttgagattaaatcactgtgtgcttttgttgaaatatatgctgcaagtcaagtcagtgatgagcggcatgtgttgaggcttaaaatatcacttttcatggtcatattctctacttcctctttcacaaactatgtgagctgcaattgtaatttcagtatcactaaatgaaggctacatggagtttcttgtcataatgaaggcattttctgtttgagtctttctcttctttcccaatccctttccccagaccaattcccacaaatgttccaccaactcatttccatcgtgttacatgtctgtgtcttcaggtactatatctgtattctaacattactctctcagtcccgatttgtggaagccaatgataacaagattgcttaggtacaactgaagaagccaattttcatggctttgggaaccttctgcatttagaactgtagcctaatgtataaccaagctaacacacacacacacacacacacacacacacacacacacacacacacacaccacacacattaaatcaagaaatactcagaggaaagctccaagtcttatagcagaatggaagggaacatggaacacagttcagtttccagtctggatctcgtctgggtagatgaggtcatttgccatctggtagaccctgtgaaatgaaaccgtgagctaattcccatttctagaggacaggctcttatcacagaaggcccactatcacccagactgccctttactgaaatggcttatgaaagggcggtgatcaatggggtctacagctaagcagctatctctttgcttcagaagtagcccccagggatggattttacacataccaataacatacttgtccttggttctttccatttttaggcactcagttattcagacaaatcaaaattgcttagtggtaatagtactattactattaactggtaactatctggttggagtggtaagacaagtgaatgcaagaactgaaaaatagtcatccaaaaccggaatttggataaatgccatctaacttattttaaaattatgggatgagtattccccttttagaaaagtatataaattatcaaacacaagtttacataatttatttgaccacattttatgacatttgagttgtgaatgaatgactgaaatgaatgctaatcatttgaatctcaaggaaattcaaagtgagctaattttcaatgctcaggtattataagatgtaatctgccaatgatgatgaaaccctgttaccacaaagcatcaaacccccaaaatcagaaaaagaacactattttgtgggtgaggagttgcaataatgtagtcacttttaacaggataaatgttttttataacatttattaaaatacttaaccttccttaaatctgtgacagccaggataatttttccaacttcccacatgggtaatttcaagatatcactatcctcctgtaaatggcagatgagtttgaccaggctcactcttaaattccaggcatgctggctttcctgctgatctgtgaacattcattctgcctcaggacctttgcacatgctcttctctcttcctggaaagctcttccccaaggtcttttgcatggttgattccttctggtcattcagtcatcaggtcacatgtcatcttcttatggaccacattctttaactagcccctcctcaacagtcattctctgtcatattagcctgttttattttccttataacacttaacaatatctgaaataatcttaaagtttatttgtctattttctgcccttcccccaactagaatctaagtactgtgacagcaatgtctttgtacatcttgttgaccagtttaaccccaggacctacaacaatatctaaaatttaatgggtacacaataagtatgtatggaaagaaagaagggagtgaaggtggaggagagaaggacagacctacttacctatgtcaacttttttctctacaagaatcatcattgcaatctcaagaccctagtatgtctcatttttccaaaatttgttctgcccacaaaagtaattctaataacagggaggaagaggaggaaatgatttaagaggaaagacaaaagaatctttgggaatgagatttaggggtccatgtttaataagcttcctttttaaatattgcacacattaaactttgagaaacactgtttgaaatgtttttaatcatcacaatgtgtagttctgtagctaattcatttctaggtttttgaactaatcatagcccttggtaaatacttgttgaaggcctagtagtttcaaaattgagcattctggaggaagaacacaatccctaccctcaaagaacctttgatctaatcgttgcagagaaaagacaaagaagcaagaaaagttcaataataaggcaagcactgaataataatttgaaatcaggaagcaataaatcaaggcactgactctaaaaaggagataatttctgtgatctttctccatctataaaacaagttaaattctattattaccttagaagtttgttaagctttcaaactaatattccactctttattagcctcatatctcttcatgcatgtgtgcagggtatccaatgaataattactgaacaaattggatatcaaagcaacttcaaagtggcttgattttaaattcaaaatattgtctctttatgattttcctcggcatgacatagggtcttctgcacttgttaagttaaaccttcttgaatgtctctgtaacatatggtgaccaccttaaccaagctaaatctcataattcattgtactagtcagggttctgtaaagagataaagctaataggatattatattatatatatgggagtttataaagtattaacttacacgatcacagcttcccacaataggctgtctgcaagcttgaggagcaaggagagtcagtctaagtctcaaaactgtagaatttagagtccgatattcaagggcaggaagcgtccagcatgggagaaagatgtaggctgggagactaggcccatctcaccatttcacatttttctgcctgttttatattcgctggaagctgattagattgtgctcatgagattaagggtggctctgccttccccagcgcactgactcaaatgttaatcccttttggcaacacccacgaagacacacccaggattaatactttgtatccttcaatccaatcaagttgacactcagtattaaccatcgcaagtccaccccttgtcaacttgaacccaaacacatctcctgagatcatacataatcttcaaataaagacaataatgaggtcataataatgcctaacataataaaactatccttcatacaactggaaacacaccaacccccaacccaaatactattacaaaaagttatcaatacttaaatgctgatatgcagtcaatacatcttatgtcacatgataaaggaaaaggaaacaaaattaagatattttcttagtacaagtgtatacatgcacaaacgtttttaacagaagaaggaagaaatactcatgacaattacagtcctcgtttctgcagctgctcaagtagctagtaatgattactaccttcttctactactcattgtcttccctttgccttcagcaagcacctcagcaggtcatggttttttttcctggtggagtgacccaagccttcattcctgaggggtctgggtcacttgtagtcctacctggattgggcggttgtaatttcccattgactttaatcacagggcatggtaataacctaatggacaccctaaaggatctcccgtatcccatgcatactctttcttacctccgttgtggagtagtggactgatttcatcttgatagtctgggtcagtcaccccagccaacactgtaactcccttcttagcctgttgacttaaaggtaggaggaacccaaggtgtccaggtggcaatcttaactctcagtttaatggaatcattgttgtgtctccagatggcagcgttcctctctctggagctaagacctctaggacagcagaacattatgttgcaggaacaggaagcaaaacttttgctagtggatcactaggggtgatggtgagtggttccgcttccacttccacctcttgattcctggacccgtgcatcctggctatgggagaaacagtaccatatattggacactgatgcagagcatacatccctgccaccatggccttctggagaactttgccccagccctgcaaagtactgtcacctagttggcattgtaattgtgacttcgaaaggccagtccaccgttctataaatccagctgcttaaggatgatggggaacatggtaagaccagtgaattccatgagcatgagcccactgccacactactttagctgtaaagcaagtgccttggtcagaggcaattgtgtgtggaatatcataatggtggataaggcattcagtgagtccacggaaggtagtcttggcagaagcattgtgtgcaggataggcaaacacgtatctggagtaagtgtctattccagttaggacaaacctctgccttttccatgatggaagaggtccaatataatcaacctgccaccaggtagctggctgatcaccccaaggaatggtgccatatcgagggctcagtgttggtctctgctgctgtcaagttgggcactcagcagtggccatagccatgtcagccttggtgagtggaattccatgttgctgagcccatgtgtaacctccatccctgccaccatggccattttgttcatgggcccattgagcaatgacaggggtggctggggaaagaggctgagttgtgtccacagaatagatcattattaaaatcctcctctgctgaagtcactccatgtgaacactcacacgggatacaaatatcttcacattttttgacccctcagataggtccatccacatacctcttccttaaatttctttgtcaccaattttccagtcgtgcttcttccaagtccctgaccatccagccaaaccattggctacagcccatgaatcagtatataatctcacatcggaccgtttctccttccatgcaaagtgcacaaccacgtgcactgctcaaagttctgcccactgcgaagatttcccttcactgctgtccttcagggatgtcctagaaagggccatagtgctgcagctgtccacttttgggtggtgcctgcataaccatgcagaaccatctgtgaaccaggccttagtcttctcgtctctgtcaactgatcatagggaactccccatgaggccatctgctgggctgagggagagaaggcagggtggcaagaatggagaccatgggcatttgagccacttcctcatgtaactaacttgtgccttcaggacctgctcaagcccgatcacgtatacaccacttccatttgatgatgggatgttgctgtgcaaaacccgctttttggctggatgggccagaaaacactcagttcatgataggcaattcagtttgcatggtgacttgatgacccatagccaaatgatcagtttccaccaaagcccagtaacagcaaaaggagggtaattatctgcagatggcagggccttgctccaaaatcctagaggcctctgcggtgattcaccttttgggcttgccaaaggctccaaatagcatccctatctgccactgacacctcaagcaccattggatctgctgggtcatatggcccaagtggcagagcagcttgcacagcagcctgagcctgttgcagagccttctcctgttctggaccccactcaaaactggcagcctttcgggtcacttgataaatgggccagagtgacacactcaaatgaggaatgtgttgcctccaaaatctaaataggcccagtaggtgttgcttctctttcttcattgtaggagggcccaaatgcagcaactcatccttcaccttagaaggaatatctcaacaggcccctcaccactggacccctagaaattttactgaggtagaagttccctgaattttagttggatttatttccgatcctctggcatgcaaatgtctcaccaataagtccagtgtgtttgctacttcttgctcactggatccaatcagcatgatgtcattaatgtaatggaccagtgtgatatcttgtgggagtgaaaagcaatcaaggtctctctgaataagattatgacacaaagctagagagttgatatgcccctgaggcaggacagtaaaggtatattcctggccttgccagctgaaggcaaattgcttctagtgggccttatggacaggaatggagaaaaaggcatttgccgaatcaatggctacataccaggtatgaggagatgtgttaatttgctcaagcaatgaaaccacatctggtacagcagctgcaattggagtccccattttgttaagtttatgataatccactgtcattctccaagatccatctgtcttctgtccaggcgaaatgggagagttgaacagggatgtggtaggactcaccacctctgcatctttcaagtccttgatggtggcactaatctctgcaatccctacagggatgcgatattgtttttgatttactatatttctaggtagagccatctctaatggcttccatttggcctttcccaccataatagccctcaccctaccagtcagggagccaatgtaggggttctgccagttactaagtatgtctatgccagttatgcattctggcactggggaaatgtctacaggatgagtctggggacccaccagacccactgtaagtcagacctgagctaaaactccattaattacctgacctccataagcccctactttaatgggaggacctcaacgacattttaggtaccctggaatcaatgtcagctcagagccagtgtccagtatccccaaaatgtctgatcatttccctttccccagtgcacaggtaccctggtaaaaggctggcgatctcctggggaaaggatgggaaaaagagtcactgcataaattgtcagtaatgtagtggggtccttcctcaaggggatccaggctccccttcattcaaggcgttctgggtctgtaaactggctcaagtctggaaatttattgaggggacaggattctctgtttttacaattcaaattagtcttttgtccatttgacttcgaagttttctgcttgtataaattaagtagaaatgcagtaggcttcttatcaatttcacttctaggaacaccatgattaattagccaatgccagagctctacatgagtcaggctattctgattgctgctttgcctctgctgtccattaaggtagctatgcccaccttgcctttgacagttgagtgccatcacttggcccctgccacctcaggatccagttattcccactgtatttacattttgtagttgagtgacttggttcccactgttagatctgacatacagagaagaccaattataggactcttcaaaaacataagtgctgccctcataaatctatttcacaaggcattgatcaagggtatgtcttctggaacctcccagctgggatgagtatgtctaaagtgactaatccactccaccatcccaatctccctaagcctttgggtcccttcctctacattaaaccaggggagaccaggcatttccagctcactcacagtgagtcatcttttaattcatatttcatctaaccaagcaaataaactattagaacctttttttaactccctgagctgcagtattaaaagcagagtgggcccaaatcaataaattcagcctgatccaactctatgttccttccaccattgtcccatacccttaatatgcattcttatgcctgttctccagaatgctgtttatataaattagagaattcaaacagttattttcaagtgtagcacacctcctattgggtcacactctcaacctcatctctaggggtccactgggactttagtctagttacaggtctagaagcaaacaggggtgttggggtggctcctgaggagaatcaacattatttggcctggtgagtgcctcagggaggccatcactgttgcctcaggcagcacagggtttatgtcctcagacagatgtggaaaggctatggcagtgtgggtcagggaggagatgttgccactactggggatggggaagctgttccttctggcaaaaaaggtccatcagagtttacaaactcagtatccccagcttcattagggtcctccacacatcccattccaagttgcagggtcccattcttttccaatcaatgcctttaacagtagacactgggtgaggctgtgcatgcaccttttgttgcaagtcagccacttgcacgataagaacttgtgtctgttttccacaatttcagctctttctctacgggagataagactctcactcagggcagtcttatcagatttaaggctcagtatctgcttctgaagccaggagacagaatccctgagttcatcattttctttcatcactttgtccactgaacttaggaccaaccagcttcattatgttctttggttctccacatatggtcaaaggtattaggtatagtcactaaactccttgcctcttaggagcggtgaatcaggagtgtcaaatgcatttattttgcataactctctaaacagtttatgccaaggactatcagtgttttccatagtattagaactagagttcttggcattttggggtctaatcatattaagcagccaacttccccaaaaccaacaaaagaactccatccttaatattcagttcctctagaaccattcctgctacaaaaatctgtattagtcagcattctctagagagatagaactaataggacatatacacataatacttaatagtttattaagtattaacttacacaatcacaggttccacaataggctgtccacaagcttgaggaacaaaaagagccagtccgagtctcaaaattgaagaacttggagtccagtgttcgagggcaggaagcatccagcatggaagaaagatgtaggctaagaggctaggccggtcttgccagctttgctggaagctgattagattgtgcccatcagattaagggtggatctgccttccccagctcactgactcaaatgttaatcccttttggcacacacacacccaggattaatactttgtatcccccaatccaatcaagttgacacttagcattaactatcacactcatgctatggtgaatgtggatataattgtgttgaccacaagacagaatatttgcagtcaggtctgtcttagaaacatgatacctattataaaagagaatttccgtaacctgtagggtgaagtgtcagtacaatttctgctttgcaaatactaggattatggaagattaaatgtgtgaaaggactttgaaaaattaaaacatatcattaatcaacaagtcattccttaaaacctcttattcacctactatatactctttggacagctgtgtagggtcttaagtatagaatgacaaggagtgattatctcttaaataatattgtcatccgtatcccagaacttgatccaacggaagaactctcatgggagtcagtgaatttatgatcaaatgattggtaaaacttttggggggaggtatgtgcatttatgagatgtgttcaaattcttctccataagctccgagtcttaaacacttagtctgggcctgggacaaataaatatatttattgcctgttctattcaatatgtctttctaaataaaaaatcacaggaatgcatagtctcagcatagacagcccatctgcagtgaaaccttccctgacttatagcccaggtttgatctgagctgtatgttttgtcttcatagctgagatcccatgacaatacttattccactttattgttatttcttgtctaaaattgtctgccttccctactagacaaccagctcttggaaaccaggcatttttttttctctctttttctgtcattgtagtcccagcctttaacataatgcctggcatataatgagtcttcaataagtacttgttgaatgaatgagaatatctacataaagattttgtgtttcttctaaaataagcctacctcaagagtttctaaccatttggagttactgaaaaggaatagctgcaagtcataaatatcaattcctcctgccacaatttgtaggcctgtaactaattcatttctatcttcttgtactaatcagatctcttaaagcatactcaggatttcagagctagaaggaaaacttaagaattatcaaaaggaattccagagtggttgtgtgatttgcccaaggccatgggttagtggcagagctggggcaaaatgtcagtctctgatgtgaacatcattaccataagagaaattcagtgccaacatcttctaagcagtgactcaacattatttggacagaatttattaaaatgaagagcctaggcctacccagttattgaaaaggaataaatatttaaacatcttattattctgagatgaatatgagaatatgcctctggatagttaaaaagagtcttccaccaaccaccaactttgcaaatgggtgtttcagagaccacacataatgcatggtactaattaattgaaacaattttcaaaccagagtagatttttgcctttaaaacataaaccaagccaaaaggagtgtcatgcttaattatctgcataaaattttctgaccagagcactcatttagctgaattaccttctccacagtggagaagaaaacatcatcaggagacttagttaaccaagtgtttgaagaactaccattctgcaaatatcattgactccccccaaattctgagatgtaatacttactctaggatggaattactttaggcaaataagaaagcattttacctatcatagggaaaattaaccctgatcattgctacagctcttgaaaaggaaacttttttagtatattcactcttaatggctaaggaggtgtctgtagagttcctgggaaactgcacagagtctgagtattctctggcagactgaaatgcagtgccaaataattttttaataagaaagcatattctggaaattaattgcacatatgagacatctccattgactgaactgcaaacatgattgcatttccaacttacagatcttttcatgttccttgcgtgtttcctatggcttcccattgcctacaggatcaagttcagaccctcaggaaggcttgcaaggcccaacaggatcttgctggcctaattctccaaccctacccccaccactgccctcagcctaggcactacgcacccagggataccgctgccctcagcctaggcaccacgcacccaggcaccgcacataccttgctgttttgttcttgtctgctttaccttcagcacctcctttctaaagttttcccagatacaacatctatgcagagtatacccaacgttctcttatgtcagccacacatcattcagtcaatcacatattgactgagtagctaccgtgtggtaggcacaagggaggaaacaagataaaggaccttgtccctacccacaggaaaatcagtggaggaaataaatgttataattactataccttggtaagtgctaaaatattctctgtatcttacacatgcttctgatcacacaatattgcaatcatttttccacatgcaagtctccctgactaggttttacctttttgaggctaagaacataacttatcttggtatccacagaattgaaaactgtatctcagacatatgaaagctaaataaatatttgttgaatgttgggtaggcaaagttctattttaattgtatgtagtatgaagaaatttgaccaagtctggctaatagactattaattataggaatggacagaaatgataagtaagggcagaagggcttcaggtatctgacatacacatctttaatttctgtttcccctttgaatacagagcaacatctcctgacctttccagaacagctgaccagatgtggagatgcaatgatgcccatatttgaaaacagtatagtaccatgacaggcaggcaggcccaggctatttatttgttgtgagctctttggcatgtcataacttctaggcttgatccagtttatagaagagaaagttaaactatattcattcattccctcatttattaaataatattgtgtttctaccatatgcctagcattgtgttcaggacccaggaagcaaggaacaatgaatgagatgtgatcctcaactccatgaaacttatatctgttgggagagggagaaacacacataaaatttcagtgcagatttggagaagtattatgggctgtggagattggattttatcctgaaagcattgaggaagtctttaaaaggtaaattagaggaataactccatcagatatgtgtgccagtggatcaccctggcttcagtgtggcatgggttaaagtagccataggttgtaggaagagggaccaattagcagactgttgcttggtttgagtaagtggcacagccagaggatgatgaagagacctcaggtttctgcctgccttaagtttctatgattggccaccctcctgtgtctgtgcagacagtctgaatgcagattctccaacagaaggtttgtggttcaagattgcctcacaattgctggtaaagagagctgaggatgatcccagatggcacttcaactttctctaattttgaaccttgctgtgcacctgaataccacatactgacttgagcaaaacagtagtgttattgttagggctgaagcaagctgtttgtcgagactccataatgcatattggtgacaacaggaattaaactctccacctgcaggacagccagccagtggggtgtagaataagtgtgctggcagagactttagtatgtaaaagtgccgcaggaaaagggggcaagctttattctagaagagtcccattcaaaccatagcagataaagatattataattagaaccagaaccaagaataaatactagagtaagaaatgacaccagtttgcttcttcccagtatcagagagtgtctctttctggctatatggacatgaaattttgactgggttccagaaaggcaagaaagggtggtttgtcatgggcttttcaatgcctacgaaggactcaaagttatttgagatattacatttgaatatgatttgatgtgctgtttgataaaagaacatcaatgggcaaaagaatcacttagtcaaaaataagttcttctgactaggacttatgacaactagggaagagtagtaaccaggcttttttctggaataagaactatggtgtccctctatgatgagcaagatcaggtcctccaaggagttatacatcgcaatactgactggtctgacaagtaaaagaccattcttagtacccccacagagcatgctgatggtatctcaatctttagaaggtttaaaggatgggatggcgccagaccttactttatatctctttcagggttttgtgccaacctatgaacaccaaaactcagcactattttatgcaaactatgcctgtagaccatatttaagagtatggaatgacttctctctggaaagagtttcctcgcctcatccccagtataacatgtcgaaaagaaataaggaagaagaaatccaggatgctagttttgaaaatgaaattttgttcccttcccaattttaaatgcaggtatactcattgtcttctcgaaatgacaaaaggaaaaaaaaaagaggaaagttacaattattcataaatctaccaataaaatgtaattactgttggtacatgaatgtattttcatacaatcaacacgtgtatacacgacatttaaatgtacttccttctagttttttattcatctatgttggatatgtggggtttatgtgtacattgatttagcagtgcacgtgatcagtggtttaaaggaggggatggctttgctgttagatcccagttataaagacttatcttgtttaatagtttgaaaccaaaatctatttcaattagagttggaataattaggaaatagtcttgatacttacgctaaattatccatttactaatccagaagatatattcatccctctagtagcttaaaaacccctttctttccctgctgtttacaacccttagcacttttcaattgtggcatgcttccatctctttcatcccccacctatatgctcagacacagaatgtgttcaggcaatttttaagttttgtaaatcattcccaatagtcccttaatccttcttgccacttttctctaaatccctttcagtcgatcagtagctacttggagggtatggcctgcgataacctgacacaggcttccaggacactgttagaggtgatcgccatcttcatgggcagtggggcagtcctttgtacatatgcagcctcacgtttgcctttattttcccggcttctgctccgtgatgcaatttcctgtccataaatggtgcagatctaattccctgaccaccatatagtaaaggtttactttgacatattgtccttcctaaaaagaaattttactgcacagttataattatcacatttttcttaattagcaacctcttctgatttctttttcatcttctagttttataaaacattttctttatcttattttaacccaacttactgaattctatgactattttcttagttccttttttttgtacttgataagatctctgagctactctttactgcttagatttttcaagtatatggtattatatcttgattttggtgtaatctcagaactccagctattcttccagtctatgggtagaataattatgtcattagagacattggagcctgcctctcccatgacggccagctggcaggggatatatattatatgtcttggttgatggctttcaagtaaaagggtgaatctgcgaagaccagtactccttgccaacaagctctttataaaatcaactatttcattttgccgcctgagctctcctttggccgttagattgaacaatcactggatgtttcctaaatttgtcatcaccccaaacggagactctgtaatattaagtaataactccttattctcctcttctaccagtccctggtaacttcaattctactttctgtctctatgaatttggctgttctagctatttcctataagtggaatcattcaatatttgtcatcttgtgtctgactaattttatttagcataatgttttttaaggttcatctgtgttgtagcatgtatcagaactttgttcctctttaacactgaataatattccattgtatggctataccgtactttgtttttccattcattagatgatggacactagggttattttcaccttttgcctattaaaaataatgctgcgatgaacactggtgttcccattcattttgtaaagtaaccccctcttttttcttccttctcagccacatggcagcacttgagtctccaactctcatatccatggaggccgtgctacttccagccgttcccacctccacacacaaaagtaaaatagaaatttctttataagggagaaaagaagctattaattgccctaattgtatttctttgtttaaaaattatatatgtttttgaaaaatatagaaaaaataagagaggggaagtgttcccatactcctaccactttggtgtaagtaatgatataattttggtttatttctgtcagtttttttgcattgcattctttttcagacctaaatgtgagcatgttatggttcagaagtctaagtctgtttttgtttttgttttgctgaaattaaaatagccattaagatttcctttggtcagtgtttgccttttatatcttttttcatcctataattttcagtctttctgtgtacttatatttcatatatgtccaagtctgctcctaatatttgcagagcctgaggcaagagtacaaatagaggcccacatgcattctaattgctttattcagtaattatatcttcatttaggaaagattttcaaattacaaaggcctcatctgaccgattccagttacaaattagatcagaataattctcttgctcatttttattattttggctagtaattaaatcctcattaaatataaaatgtgttgtttgaaaattttttatgatgaatgcttgacagagatttacccactttcattatttctagtttttaaaaatgtcagtagactgcttatttgtgtattttatttttttggcttttttcctcctaagattttttttcataggttctcttttatcataatctcaaattcttctcattctatttcccctcccaccatacacactgtgaagcagtgactagctccttcttagctgcggtaaaacctgcaaatctttacggcatttgaacacagtgaccatttgtttcaaggatttagggcaaggaaatgtggagaagtactttttctggaatgtgaatggtattagacacaaccgtggatgtttaggattatagatcatgctgtgacagaatgacaaaggtgtcaatgtggtctttaatataatttgtgtgttggtggtatgatgtgccatttaaagcagcgcttctcaaacattaatggtacatatgcatcacccggagaagcttcttaaaatgcagattctgaatctttagatctcggatggggcctaacagtcagcatttctaacaggtgcctgagtgatgctgttgctgttggtccgagatccatctcttgagttgtaagactctgaagcataggaccaagatcaggggtctctctcatctgatattaagagtagtactctgtatgtcctatatgaatacactatagctggaattgatttttaatttgaaattataatcatcgccttttaagagtcatgtttagtttatttacatttattgtaattttctaagttattgatatattgggattttttccctattatttaaacactggctttgcattttatgcattctgtgctttgggcttttttttaaaactctccttttcccctggaccattttttccccttcttcttattccatttttagcctgtattagtttaaaaattaaatgcttgatttctattctttcaatgtcattcttaaaattttaacatgtatattaccaaagtcctaaatgaattaatttatttttaaatggcaaataaaaatcgtatatatttattgtgtacagcatgatgttttggtatatgcatacattatggaatggctaaatcaaggttaattaacatatgtattgcctcacatacttatctttttttgtggtgagagcacttaaaatctactctgttagcaatttttaaaatacaaaatattgtgattaactataatcactgtgatgtacaataggtctcttgaatttattcctcctgtctaattgaaattttgtatcccttgaccaacatcttcccagtcacacccccatccctctggtaaccatcattctactctagttgtatgagttcaatttttttagattccatttataagtgatttaattaatatctttatcctctttccagataattcaaggaccttagcattttaactctagtcaactgtaatattacattccatcgtattgcagtattttagtcttcttctattaagccttccaaattggatattagcattattgtggttgtttcacattagcattattgtggttgtttcagatagtcaatattgatgcagatttacctgaatattacccatgattaccatcattccttctttctacttagatttccatcatccttcttcttgaaatataatttttaaaaggtccattgaagaagttctgttgatggtaaatacagttttactttctttgaaaatatctttattttgcccacatcagttattttattgttcagtattaagaaaacctaattcctgtgttttcttcccatcattgttgatattgagttgtgtgccatcaggcaaatgtcattactttttagatattctaaactgttgtttctttaagtaagtacattgtctccccttaatctgttctcttcgtaatgttttatttatttgtctcactataatgaattctggacagtttcttctggtctttctttcagtttgctaattctctattcagctgtatctaatctgctatttaattcatccatcaagtattttttccttagtattttgttttaataattttatttactatttctagatttttttctaatcatcctggtctttgtcatagtatcttcttctttatatacattttatttatgtatctgataacattaataacttaaacctttgtaagttataagtatgtttttagtttttgtgctgattttgttcaaataaacatattttgtatgtgtgttgtttgtgttcttgcagatgtgtatgtttatcatcactctacactcatctggactatatctttgggaattcttcatgtcctatattgaaaatccacttcttcaaagaaagattacatttgcttttgccaagcccctagaagccctacaaactagaactaaagctttactaaaataagcctagaccttctgcacacatgccaatagtatgaatgcaaatcacaaatctacatcatttttatgaattctaaacttttatgaagcagagaattttttttattcttcttcacccagaaccaaggacaaaacagacaagttttcttttacgttccctatgcttgctggattttctctttctagtttactcattccttagggtcatggtttttcaggtcttccctcattgcttagggtcaagactgtgccccttgtccctccacatggttgttgaaatgcaaagctttaggttaaaggatcagcagttacccttagagcagccactgtctgcaatgcccattcattatgctagatttttacttcagtttttttttttttgagctctgtggagttcttttacttaactgttaacttgcttaataaaaacagatttaagaaacattttgaatgtttaaataccagcttttcttggtattctataatgtgagtgcttgtatcaattacaaattttaaaatattatttgtaaattaagtggttactatggttaatttagaaatgcagaaaaatagaagaataaaaaattttagaattttgtaaactagagatagcataaccattataaacatgttagaatttaagatttttttcatatacatttttacataaatgagattacactacatttatcgatttgagcataagatattctcaagtgagaaagtgaatgattatattgagaggttggcagcaaataacatcaagtctttccaaatgaaaacctcaattctcatatcattaaatataaatttttcaatgtagtaattattcatcatgtatatttttaacaataaaacttctatttgtggaagtacaagtttgtgtaggggacacatgttttcacttctcttgggtatatacctaggagtagaattgctgtatcatatggtaacctgagtcttagccttttaaggaacagcaaaatggttttccaaaaggctgtaccattttacagtcccaccagtaagaagaggagagtaggacacagagaccacgtgaagacactttgccaacacatgttatcatctctctttttaaatcttagccatcctatcaggtataaagtagtatctccttgtagtttgaatttgcatttatttaatgaagcatgatgttaaacatgtttttatgtgcttattgtctatttgtatatctttcctggattatgtctattcagattcttggcccatttttattggattgtttttatttttgagttgtgtttttaatatattctggatacaagttcatataaaatacatgatttgcaaattattttctcccattctgtgggctgtcttttcactttattgatggtgttctttgaagcacagaagtttttaattttgatgatgctaatttatctatttttgtctcacttatacttttggtgtcttatctaagaaactgtcatctaatccaagatcatgaagaattattcctatgttttcttctaagagttttgtagttttcgcttttacatttaggtctatgactcagtttgaattaattgtatacatgatgtgacagagaggtccagcttcatctctggcatgtagatatccagttgtccaagcataatttgttgaaaaaactctgctttcccctattcaattgtcttggcatttttataaaaaataaaccgcatatctatgtattttaaattcagttatatatactgtcactagccataccaggcatcatatgtacttacaagcttaagactagcatggaaatgattatcacgggccatggcaaagaataatgatctgctatttccaaagattctgtgaagatgactgtgcagccgagaatttatttggtttatagagactaaaattccgtctgctttgttcactattgagttagtagctaaacagttgtaaaatttctcaagtctctcagagctcacacttgcaggaagcttgatttcacaacttgtacatgacagtctcacataaaagtactctcgtgagagtgttactatggacagaaaaaaagactatacctcttttatgactgctgttgttatttagggcttcttttttcttgatgttgtttcaaaaggttgcattttgcaataagcagcaacaccttaagatagatcttaaacagaaccatgtttaaggcttttttttctcccctttagtcacagtgattttccatttgccctggaaggcattcagcattacttgtaaacagcaaagataaatgtggcttctgatattcatctttatgaatagtccatatgtttataaataggaatagaacaaaaagcactgtcccaaactttcctttaaattctaaacatctaaatgtattttaaatattccaccccaattaatctcacttttaaataaaacattgcatgtctaaggtggaaaaacaaaagactcttcgacaatgccacacaactgcatatgtttgaaaatagggtggtcacttttaattgatatagaggaaatttgggaaagaagaaaagtaatcaactttcctatatctggagtcctttaaccaataaacagacaaaccaacataaagcacacatggtaagctcagcacacataactgaatttctctttttacgtttttgcacctcagcctgtccaattgtgcaaagaaggggaggaggattaaatatgcaactgagtagccagggcctctagctgctggtagttcctcaaagctgtacatccctccctcaccataacttgtttgttctctccagcaaataccatttactagggtgcccagattcacctctgtaggcccaagactgtgaggttcctagacaacaggattttgctctgaatatcatccatatatgcactctttaatttaaccccgtcttggcaggcataaggagtagcacaatgaaaaaatgtagatcctgcccccaacaactgtgtaagcttaggagaccagcactcagaagaaattttagcatagagtaagtgcacagtaaaagtttgttaataaggaaggaaagaaagaggaagggtgtgcaggagggaggaaggacaaatttggatttcatatgtcataccagagaaagatggaagcagcatattgagatatagaagtggtgtaaaagacaagaagaaatcagtttaagaaggcataggaaccagaagtggaaaattagggtataaaacttaagtgtctttggagacaaactggatttgaatcttagatttgccatttgctggcagtgattttgggcaatttacttaattatatttgatcttcaatccgctgtataatgtgtaaggagtaactatccacgtcattggaattattaggaggatttaataagataataagttttaccaatttagcacaattcccagcacataggaaggactcaggaaatattagccatcaatagaagacactatctattcatttatttacttttatttacttatttatttatttttgagacagaggctcactccgtcacccaggctagattgcagtggcgcgatctcggctcactgcaacctctgcctcccgggttcaagcgattctcctgcctcagcctcctgagtagctgggactacaggtgcgtgccaccaaatccggctaatttttgcattttttgtagagacagggtttcaccatattggtcaggctggtcttgaactcctgacctcgtgatccacccaccttggcctcccaaagtgctggtattacaggaatgagccaccgcgcccagcctagaagagacgctcttgatattcaggttttctttaaccctgagatgtggccatggcacacaaatgtaaacattttcaaatcagtcccaggtggtaggcttctagatttttgttttttacctttgaaatcggttcaagacaatgccattatggaaagcctctgcagaagaaactatttttattgtaccaattgcctttctaaaatctgtcaaatcttttaagtttctcccttgacctttttggaagcttaaacaggaactgaatcatcataaaatttttgaaatttgccttgaatctactttggagctgcatgaattgagatctcttggtaactgaccttgtgttgacccagataggcctgttgcagtgtacggcatgtacaccgcacacctgccaccacccctgtggcagcaatgtttgcgagcctgaagagttttgtgtggggagttatgacagaagtcagccaagtgtaggtaatgatgtcaggtagcatgggaggttggagcgcaggaagaggcaggggggggatctttaagcaaggaacccttgtatccagctgtgccaaatgggccttccctgaggacttgataggcaccctattgccacttgtaactcagcaattgaggtcacagtcaaagaaaaaaacctttatttttcacaatgtcatctttcagcagtacagcttcataagtgaagatggtgatgttccaacagttcatctaaactctttaaaatcctaccaaatacgttgcaggtggtgggtatgtagtaaaagtggataggaggagggtaagtattgaaatctgtttgagatatgaaattacatgagtaaggtttggggttttcaccacaatttcactcgcgtccatgtgaagagaccaccaaacaggtttgtgtgagcaataaagctgtttatttcacctgggtgcaggtgggctgagtccgaaaacagtcagtgaagggagataaggatggggccattttataggatttgggtagataaaggaaaattatagtcaaaggggggttattctctggcgggcagagtgggggtcacaaggtgctcagtaggggagcttttgagccaggatgagccaggagaaggaatttcacaagacagtgtcatcagttaaggcaggaacaggccattttcacttcttttgtggtggaatgtcatcagttaaggcaggaaccggccatctggatgtgtacgtgcaggtcacaagggatatgatggcttagcttgggctcagaggcctgacattcctgtcttcttatattaataagaaaaataaaatgaaatagtggtaaagtgttggggtggtgaaaattttgggggggtgatatggagagagaatgggcgatgtttctcagggctgcttcaagtgggattaggggcggcgtgggaacctagagtgggagagattaagctgaaggaagattttgtggtaaggggtgatattgtggggttgttagaagaaatatttgttgtgtagaattattggtgatggcctggatatggttttgtatgaattgaaaaactaaatggaataacagaaggagaaaaacaggtataaaaggtctaagaattgggaggacccaggacatcagattagagagtgcctaaggagattcagcatagtcctgccagcaaagattatttatttacttcaagagttaagagtggcagtttggggatagcaccaggagatatcagctgtgatggcttggagaaacagtgtaaactggcagtgtaaacaagagcagggcatgtatgagtagttgagaacggtgaataggagtatgactagacagaagatagtagggatgacaagttttttgggggcacagtctaagttggtctggcgtctggaatgagactggggcctaataaaaaggaccgtctgtacaggagctcaaatgggctgtacgctgtagcattctgaggacaggtctgacttctgagaagggaaagtggtaaaagtatcatccagtcctttttaagttggtggctgagcttggtgtggtgtgtttttaaaagacctttagtccgttctacttttcctgaaggcagaggactgtaagggatataaagctttcactgaatactaagagcctgaaaaactgcttggctgatttgactaataaaggctgatctgttatcagactgtatagacatgggaaggctaaactgaggaattgtgtctgacagaagggaagaaatgactatggtggccttctcagaccctgtaggaaaggcctctacctatccagtgaaattgtctacctagactaagcggtattttagttatctgacatggggaatgttgagtaaagctaatttgccagtcctgggttggggtaaatcctcgagcttgatgtgtagggaagggaggaggcctgaataatccctgaggagtagtagaatagcagatggaacactgagaagttatttccttgaggatagatttccacgatggaaagaatatgagaggttctaagaggcgggctagtggcttgtactatagcatagcctgcctttggtggtgtgtggcgattaggcctggtggaactgccatcaataaatcaagcgtgatcagggtgaggaacaggaaagaaggaaacatggggaaatgaggtggatcagagagatacagtcatgggggtcaggtgtggtatcaggaataatgtgggaggccagattgaagtccgggccaggaacaatggtaattgtcggacttaaagagtgagtacagctgaaggagccgggagcagaaagtatatgcatcaggtatgaggaagaaaatagattttggaagttatgagaaatgtagagagtgtgttgagcatagtttgtgatttttagggcctctaaaagtattaaagcagtggcagccactgcatgcagacatgagggctaggctaaaacagtaaggtcaagttgtttggacagaaaggctacagggtgcagtcctggctcttgtataagaattctgaccgcactaaccatgcctaggaaggaaaggagttgttgttttgtaagggattgaggtttagggattaatcagacacgatcagtagggagagcacatgtgtttttatgagaattatgccgagataggtaacagatgaggaagaaatttgggcttgactgaagtaatgggggctgcctgtgaagctttgcggcagtacagcctaggtaatttgctgagcttgatgggtgtcagggtcagtccaggtgaaagcaaagaaaggctgggatgaagggtgcaaaggaatagtaaagaaagcaggtttgagatctggaacagaataatggattgtggagggaggtattgaggataggagagtatatgggtttagcaccatggggtggataggcaaaacaatttggttgataagtcatagatcctgaactaacttgtaaggcttgtctggttttagacagataaaatgggggaattgtaaggagagtttataggctttaaaaggccatgctgtagcaggtgagtgataacaggctttaaccctttcaaagcatgctgtgggatgggatattggcattaatcggggtaaaggtggttaggttttaatgagatggtaaggagtgtgtgatcagtcgccaaggagggagtagaggtatcttatacttgtgggttaaggtggggggatacaagaggaggactcaaaggaggctttggattgggaagaagggcggcagtaagatgtagctgtaatccaggaatagtcagggaagcagataatttagttaaagtgtctctgcctaataagggaactgggcaggtggggataactaaaaaggagtgcttaaaagagtattgtctaagttggcaccagagttgggaagttttaagaggtttagaagcctggccgtcaatacccacaacagttatagaggcaagggaaacaggcctttgaaaagaaggtaatgtggagtgggtagcctccatattgattaagaagaggacggacttactttccactgtgagagttactcaaagctcggcgtccatgatggtctacggggcttccgaggcaatcggacagagtcagtcttcagccgctaagctaagaagatctgggaaggagtcagtcagagagccttgggccagagttccaggggctctgggagtggctgccaggtgagttgaacagtctgattttcagtggggtctcacacagatgggatacggcttaggaggaatcctgggctgtgggtgttcctcggcccagtggccagatttccagcacttgtagcaagctcctgggggaggaggttctggaggaacccctggcagctgcggttcaggcctttggagttcttgtgtgctggagatgtggctggggtttgtctcacagtggaggcaaggaattgcaactcagaaatacattgctacttggctgcctctactctattattgtacaccttgaagttgaggttaattaagtcctgttgtggggtttgagggccagaatttaatttttggagttttatttaatgtcaggagcagattgggtaataaaacgtatattgagaataagatggccttttgaccttttagggtctagggctgtaaagagtctcagggttgctgccgaacgagccatgaactgggctgggtttttcatatttgatgaaacagcctaaacgctactgatttgggagaggtcagataaagaaaaaggagcattaaccttgactatgcctttagcttcagccacctttttaagaggaaattgctgggcaggttggggagggctagtcacggaatgaaactgtaaaccggactgggtgtgaggaggggagttgataaaaagattataggttggaggagcggagcctgaggaagaattcggacctagctcggcctggcgaggaagggagaggtcagatgggtctgtagaaaaggtagattagaaagactcagtgacacttggggttgggactgaggggacaggtgggagggaaacaaggaagatttgggatgagttgcattgggaacagagactagggagggactgatgtgtaaaagaatgcctggacatcaggcacctcagaccgtttgcctattttatgacaaaaattatttagaacttgtagggtggaaaaattgaaagtgccattttctggctatttggaactactgtcgagtttgtattggggtcaagcggcattgcagaagaaaataagatggttaaattttaggtcaggtgagagttgaagaggttttaagttcttaagaacacaggctaagggagaagaaggaggaatggaaggtgaaagcttgcccatagtgaaggaggcaagcccagagaaaagacagtagagacacagagaaggggtgggggtttcttgccctccagaaaagcagagaaggggtcggggtgtggaaataaggggttggggcacagagataagaggtcagggcatggaaataagggatcggggcacagagataagaggtcggggcacagaaataacggatgggggcacagagacaagaggttggggttcctgcccctcccccagaaaagcgggacttgccgctaagggtgaaggaccaaggcaggcgtccctgcgtggtctgacaccactgaaacctgggtgaataatcagagaggcatccttgcaatgattaaacaccaagggacggctgccttccctagtccgtgactggtgccggagttttgggtccacagataaaagtgtctcctttgtctctaccagaaaatgaaaggaattgaaattaagagaagggagagattgaagtgtggcgccaagattgaaagaagaaagacgttgagggatagtgagagaggttggagaagagagtaaaaaaggctgcttattggatttaaaattggtgagatgttccttgggctggttggtcggaggaccagaggttgtaggtggatctttctcatggagcaaaatgcaggaggacaggggattgatctcccaagggaggtcccccgatccaagtcacggcaccaaatttcactcgtgtctgtgtgaagagaccaccaaacaggctttgtgtgagcaatacagctgtttatttcacctgggtgcaggtgggctgagtctgaaaagagagtcagcgaagggagataagggtggggctgttttataggatttgggtagataaaggaaaattacagtcaaaggggggttgttctctggtgggcagagtggaggtcacaaggtgctcagtaggggagattttgagccaggatgagccaggagaaggaatttcacaagacaatgtcatcagttaaggcaggaacaggccattttcacttcttttgtggtggaatgtcatcagttaaggcaggaatcggccatctggatgtgtacgtgcaggtcacaggggatatgatggcttagattgggctcagaggcctgacattatcattcataataaccagaactttatattcttaactacaattattaaagattttataggttacaatacactgggatatacctttctcaaagaaacatttaatgttatcccagaattaaaatatacttttgcaaaataaaatgtttatcaagtctgccaaaaagagagccaattattttggtttctctctaggattttaataaattcctttgatacctagtcaaagcagttgagcatcctcacattgaacaaaatgaaagcaaggaagcgatcaatctcatttgaaaagtgaacaaacataaaaatcattatcttttaaaatttttcatttttacatgttgcaaagaagaataacctttcttatgtttcttgcatgtttcttatttcctcagtaattaaaaaatcatatttagatacatttattactagtgaatgctttttcatagttttaatcacattgatttgttgagaattatcagaaaacataattattcagataaggaattgtgaacagtcttatggattaatacgttctcagaacatcagtgttttagcaaataagatattatttacagtgagcacattgttagcctcactagatgtcagtgtagttctaagtaaatattttatatagttcctcagtagtgttgaatgagaagatgttttgctttagaacttaaagattgagaagatggaatagttgcaataagtgtttgtggtacattaattccaacatcctcctctgatgaaaacacataattggtaaatttatacacatcaacacagggccaaaaaatagtccaaggatgtaaataattatggattcataggatacattgtgcttccttagtcaccaatgtattttccgtacattgaaaagtcttactgtacatcacaacatgctggtcagccttttagggcttttcccaattgcaaagggagcatggttactcctcctgccatgagagggcagcactgagattgtctccagcccaggaagcagtgggcactgtttagtatgggttagcacctaggtttttatgtggaagcattcaagtcaggctgtggtgatatatgttctcagagtctaccatagtatcattttagtgcttttattacaagtcatcaaacactgtatctgagaaacatgaggataaattatggtacattcaaaaactgctgataaatagcaaagaagagaacagggtactttgggaatataaggccttttgcgtgagaaatgttttgtgctagctatgagtgaattttctacaagcagagaagttccatttggtcctctgaactggttaacattttcttgattctttgcttagtgtagcaaataaaattctgtttattctttttgagagttcccaaaatatctttattgatttggattttgctttttcactttattttatagttgattttaagtttttcttgagtgtgttcatcagatagccatataaaatggaacaatgcatttgtaataacaaatattatacatgatatttttttggccagcccagttgcacagtcaactgagaaagtggaagttatcactttcctcttaattccttttacatatttttcctctggatgagaaaatgttactttctcatatccagaaaagtgttataaaatgatacattgagatcatctgattccctctttattgtgattgtttctttaaaagaaaaaaaagcagaaaggggccatgaacttacaaagaaagttttaaagaatacaccaaaaattgttaaaacaataaatgagttcatcaaggctgcagggcacaagatcaatacacaaaaattaattatatttttatatacttgaaataaatgatctgaaaatgaaggaaacaattctgtttacaatagcatctaaaagaataaaatatttaagaataactataacaaaagaagtgtaaaactaatactctgagaactataaaacattactgaaataaattacagaagatctacataagtagaaaaacagcccatgttcatggacaagaagattttaatcttgttaagataatagtgctcctcaaatagatctaaagattcagtacaatctctgttgcaactgggattctctaggccagttgacttctttgtacaaattgatgagctgatcccaaaattcatatggaattgcaggggactcagaatagccaaaacaatctttaaaaagaagaataagttgaaggcctttcaaatttcataacttcccaatttcaaaacttacaataaagtgacgataatcaaacatatgttactaacatagggataaacatatagattagtgggatagaattgagagtctacaaataaatctatatgtctttggtcacccgaatttaacaagggcaccatggttattcaataaagaatattttttaaacaaatggtgctaggatgattgtatatccacatgtaaaacaatgaaattgggcccttacctcacacaatatagaaaaattaactcaaagcagatcaaagatgtaaatctaagatgtatgtacatataaatctattaaactcctagaagaaaactcagggataaatctgcaggacctcagatttgccaacgaattcttaggtgtaattcccaaaacatgagcaacaacaacaacaaaaaattggttttcaccaaaattaaaattttctgtgcttcaaaggatgctatcaagaagtaaaaaaacaacccatggaataagagaaaatattttcaaattatatatcccctttggaacttgtatccagaatatgtaaagacccatacaactcaataataaaacaaattaacccaattttaaaatgggcaaagaatctcaatagacgtatctccatagaaggcatacaaatagacaaagcacacggaaagattctcaacatcattagccatcaaagaaatgcaaatcaaaatcacaaggaaataactcttcacaccccgtaggatggctgtattgaaaaaaatataacaacaacttttgtcaaatgtggaaagaaattagatctctcatacattgctggtgaaaatgtaaaatgatgctgtcactttggaaaatggactggcagttcctcaaattgtgacacatagagttacatgtgtcccagcagttctactcctaggtatatgccaatataaatgaaaatatctagctacaaaaaacttgtacacaaaggcattattcataacagcattattcataacaatcataaggtagaaacctaaatgtctgttaactgttgaatagataaacaaaatgtggcataaaatatggcgtatccatacaattaaatgttatttggccataagaagcaatgaaaatacagcagttagtgatagatgctacaataagaaggaaacttgaaaccatgaaactattaagctaagttaaataagacagccacaaaggaccacatactatataatcccatttatatgagatgtccagaataagcaaatccatacaaacagaaagtagattagtgattgctcagggctgggggtgatgggtgggtaggagagtgatagctaaagggcagaaatgttctgaaattgactgtgggggtggtttcacatatctctgagtaaattaaaaccatccaattccgtgaatttagtgggtgaattcacatagctgtgaattttatctaaattgtgaaaataaaacaggaatgtgatgctctaaccagcataggcccaggccgcatgcttctggggaagaaattccacctgaatacttgggctgtaaataggtcattttcatgggaaaaggatgaatagatgccagatggtaagaagggtgaaagtctactacacatgtctgcgaggtcggtaagggatctggtctttgcaaaggaaggttatattagagctcagttgagaagagaaagggaaagggactcaaattcatgcttaagggtgctgtgacaggtatccatacctttattaaaagacatgtacaggaacgttcatagcaacacagtttattagccccaaatatccatcaatatttgaacaaataaattgtggtatattcaaaatggaataccatatggcaacaagaatgaccaaactacaaaagcatacaatatgaatgaatcccataaacctaatattgaatgaaaagagttattcagacagatgtagtgcctcaggcttgtaattcagcaccttgggaggctgaagcgagtggatcacttgaggtcaggagttcgagaccagcctggccaacatggcgaaaccccatctgtaccaaaaatacaaaaattagccaggcaggatggcatatgcctgtaatcccagctacttgggaggctgaggcaggggaatcacttgaacctgggaggcagaggttgcagtaagctgagattgtgccactgcatgccagcctgggcaacagagtgagactgtctcaaaaaaaaaaagaaaagagtcattaacagacagacaaacaatatgattccatttacataaagttcaaaaataggctaaatgaatctatgctgtaggaagacagattagtatatatccttgtggggggctgtgaatggatgagtacaggagaggaatgactttggggtgttgacagtgttctgtttcttgatcagggtgctgtttatatgaggtgttcactttatgaaaattctttcagttgtgcacttgttatttactcaccattctctatgtaagttagattgtgacaaaagcgaaattaaaaagaaactaaatacccttgttgttgtttactttccctaaagatagagagcacatcgtgtttatttctaatgcttattcaaaggggtagagactctgagaaaggatgaggtggcgggataactacttacaagagtcacagttacggggctattatttcctgggcatggaaagagtagatcccttccagcctagccatttcattcttattgtcttggaagcaaactgtccagctgttcttcttaacgtcaggttaacaatgattgtggtcattccctgctgcatgggtcaggctgtgagacaccctccccttaaatttacatagagacagaaggtatagacaggtgcaaatgggaagggaacagcgtatttctccactgtgtgcttatgtccaaattggaaaccagccttattcttgctcactaattattaaggaaaataatttttaactatcaggacactgttcttcaaatggtgattgggtgaaggagattttctttgagttctgtgaaatactaaaaattctatgtgttgataatgactaaaaatatattttccacttgtaaagacaaaacttctgtattgcaaagttattttaatagaataaaatcttagtttcttgagtcagtcttttgcaaatagggttccatgtataaactatcaagaaaatatttccaataaatgcactggggtaggtttagatttatttgacatatacaggaatatttgagggaagggagcaataaattcatctctttaatttgctgcaggctttccttagagggagcgcttttttagctggtgttaagatggagaaaggtgccttctatcgtgctgttgctgaattccctgctccagaaacatgcagaacattagcatgacccaactgcttgaaagcaaacaagatgctcttgtcttaaaaagcatcatttcggaggaagaaaagccataatgaaccctccctttttctttttcttaactgaggagtagcaaatggtatttaagctgttatctggcaacaaaagtttcaagtaatgttttttaaaaaagcctgccaacacttctttctgctgggcactgatatagctgagttaaaggccctttcgagatggagaatatgacaagaaaagttgcacacccctaaccaaagtgggctttccaagagctagaataaagccacttcattaaggtttctcacactggtgttttttggcagcatttttcaaggatcatttcctccatgggggaaatgaagtggcagtgtctttcctaactattgctaaaggtgaagtaagaatttgaattgagaaaggcagttaaaatagtatctgaacttttgaacttcctgatcagataattattcttgaaactctgtataagatggaaaagagaattaatgcctcttaaagtgtttaattttagaggactatcattattaaatagtactccttctataattttttgattgttgagtacaggcatgacaagaatttataaagatacttctgattgataacatagggtataaacagaaagttctcttaaataggaaggtgtatatgtttggaaattggacttgtctcttttgcttagacgtgtgtataaattaatgcaagatatttgtctatatctcaactccgggtctccctcctgcatatccaactacttactagacacattcccttgaatgccccgtaggtactttatttcaacatattcaaaataaaactcatcatctcagccttctcctgctcacccaccttggccctttactactgtttcctcattcttttttctattaatcatcgttaagccagtttccaaaatcaggcatctaggtatcaaccttggattctgccatcactgatgccacataccctaataggccacttctggtaaatttcctaaatccactcactttcagcaacccactattgcccatctacaggggaccactatcattctaccacttgactctttcaacattctgctaacaagccttcttgtagcccttcactcttttgcctccttcaagccatcaccacgagagggatccaagactcaactctccttttttttcatttctataccaaaaccattctttgggtttctgttcttaggatgaactcctcaacatggtgtgtaagattctatatactctgatcttgaccctgcttactactctcgctgatgtgaagcctcctgttcctattatctctgagaacacccaaccctgcttggtggcagcaagggacagaaaaagcacttgaggcagcaggctgtcagatttgctaatagtgcaacccaactcataaaaaccaccaagtccaagacaaggcctctttttgtgaagtaacaataacaagtagaacagacatttagtcagttttcactggctgtaactgtactagtgagagaaagccctgctccacagtttcttgcatcactacactctgggaagccccagtactttaccatgcaagtgtagccccacatcatctcactctttgccgtgagtttaaattcctccaactctatccaagggtccacgttcccctatccctggatgccatgtgtttcattgacatgagttttcctcctattaagcatggaggggtcttataagtggcgctgtgaggacagatgcttgcactttgtcttgacctctgcttcagcaagtgtattgtagctacatccttagctcactttggttttagtctcaagatcatcccagtcccctcctctatatttggttcatggtttcatatactgttaaccaggaatgctaaaaatattaatttggtgcattatatttatgcgaacacttgagatgtttcaagcatgcaggaccacctgcagaatctctggaagggtttatttcctatgcacacaattagcccaaaatctttttaatacaatagatttttttatgatactatttgttacttaccttttaccattttccttatcccacctatggctccaagcagactaaatttctctcaggttcttatttttgttgtgctctctgtcttagtattttcaggctgctataacaaaatataccatgaactgagtggcttataaacaatagaaatgtatgtctcacagttctggaggctgggaagtccaagatcaaggcagtggcagatttgatgtcaggtgaagacctgtttcctggttcatggatgggggcttctcactatgtcctcacatagtggaaggggcaaagcagctctctggagcctctttcattcataagggtactaatcccattcacgaggactctgccattacaacccaatcacctcccaaaggcctcacctcataaccttatcacatgggtgattaggtttcaatatgtggatctgagggggacaaaacattcagatcacagcagtttctttcaagacttttacacacaggttgcctccagatcacaaggctcttacccctcttttgttcttggctactttataacatccacttagacctcacttccttcaggacacctaggttagacctttgcctgtgtgcttccctagcaccttccactcccttcacatagcacctaacacactctgttgggtttctctgaggtatgtaagctctgtaaccgcagggttcctgtctttcttgttcatccttgcatcttcaaagcctgccgcattacctggcccagagcaagtacttaatgatcatttgttaatgaatgaataaatagatttttccattaatcatctaatcagtgaatttacaattctatgcaattctttgatgctctaagaaattgaagttttattttctgaagttatatattagttttatttcctaaggaatttgatttatccttactttaaatcataactacccagtggttattatagctatgctgccatatggtaaaacacatgaagcatctaatattgccttaagaaagctgtttcacagtaaaaactcttcaggcccttctctcggcacttttcattttatgttgaaattattggtgtttgtatctctcttacctgtaagacattaggtgcctcaaaggcagtgaccatgtgttattcaactttgtatcctcacaaccttgtatctagtgcagtgttggaagtcagtaaatgtttatataaatgcttaagataggccagaatccacatcttggctcaaaaactgtataactgccaacacccatctctgtacttacactcccaaagcctcagtttctacatctgtaaaaatggggattctgctgtttaaaggatcatcttgcagggttgttatgaagtattacataaaatataatgtaaataaggaactcagcatagtgactgaaatataggaattatgaataagctaggatggggataaatctaagtttctttgtgaagacatatggtgtgtcaaaatgttaatttttcactgtcacaggctggcaagacacggtcttagatctagtaaaattgttgcaaaaagaaagcaaagaggcaaacttcccaacttttatattaagaatatttgtctgaaatataaaacaaagtgagaaattcaatgcaaataaaatacactacaggaaaatttatagagtgctcaaatggatgagttgcataatttgtcttatgaatatttactaaaagcaaaataaattggacaaataatattcttggactgtaaatcattgaaaatgatatatacagttggagaaaaggacaagaaaatcatagcaggacctactctttcctaattacaactccatagagttgtctatagtgtgcttgtttttcattaattttgtgattatccttcccttttctttgaaataacaataagaaaacaccaaggaaaaaggttctgtagtcataatatgcttaggaaagtcaagatgttaacattcacattctaggactgggaaacaaattttaaggaaaaataactttacccttaagccttaagcctcaggtctcccagtgtaacatgtttcaatttgctgagactaaggtgtttggctggattgtttgctgttgtctgatagagttcatcttaaagtagtttctattcttgtatgggtttgtctgacaattttcatatcatttagtgagaatttgtatttttttcaattgttgcctattcctctgtaattattgtaattgcatcttattatataatttgcgtaaatatatgcaatcatggaattagaaaacgcgggtggtgatatgcagtgtcacaactgcagtggttaaagatgtgtgatttttttaatctttgaaaaaaataaaagcgaagtaaatattgtaatttcaggggaaagcgttttagctgtctaaaactgattgcccagagaaatcaaccaaacatttttatttagacatagataagaggtttcatgtttttgactgttctaactcagagatttggaaatcttggttttaaaatatcagtttgatgactgctcaaacacttataaagtttcaatattaactttaaactataaaatactgaggatcgtatgcttctaatgataccttttctgtaggttgttatcaatgtgagtttgaataagcatttattaatactgtgaataagatgcatattatcaatattaacgtctgcatccatacagttggaggtatttatgttgatgtagacaaagacacagacagtggaaatttatatgcctttcaaaatcccagtgactataaaattctgctcctctgactatacattaggtaaatggtatatttaaataagtggtcaaggcaaaaaaaaaaagagcataattcaagttcagcacccactgcaattgtagatgataaaaatgaggcattcatcaagctaaccctttcgcctctagaatttcatgtgcactgagagaaaagtccattgatctacattcagctcttaaaaactgcacttgctgttagaagacagaacatacactcaggaaaaacttcaggctgatactgctaagattttaacacatttataaaacttcccatcaatacctaatttattgagagtttttagcatgaagtgttgttgaattttgtcaaaggccttttctgcatctattgagataatcatgtggtttttgtctttggttctgtttatatgctggattacatttattgatttgcgtatattgacccaggcttgcatcccagggatgaagcccacttgatcatggtggataagctttttgatgtgctgctggatttggtttgccagtattttattgaggatttttgcatcaatgttcatcaaggatattggtctaaaattctcttttttggttgtgtctctgcccggctttgctatcaggatgatgctggcctcataaaatgagttaggaaggattctctctttttctattgattggaatagtttcagaagaaatggtaccagttcctccttgtacctctggtagaattcggctgtgaatccatctggtcctggactctttttggttggtaagctattgattattgccacaatttcagatcctgttattggtctattcagagattcaacttcttcctggtttagtcttgggagagggtatgtgttgaggaatttatccatttcttctagattttctagtttatttgcatagaggtgtttgtagtattctctgatggtagtttgtattgctgtgggatcggtggtttgattgcgtctatttgattcttctctctttttttctttattagtcttgctagcggtctatcaattctgttgctcctttcaaaaaaccagctcctggattcattaattttttgaagggctttttacgtctctatttccttcagttctgctctgattttagtcatttcttgccttctgctagcttttgaatgtgttcgcccttgcttttctagttcttataattgtgatgttcaggtgtcaattttggatctttcctgctttctcttgtgggcagttagtgctataaatttccctctacacactgttttgaatgtgtcccagagattctggtatgttgtgtctttgttctcgttggtttcagagaacatctttatttctgccttcatttcgttatgtacccagtagtcattcaggagcaggttgttcagtttccatgtacttgagtggttttgagtgagtttcttaatcctgagttctagtttgattgcactgtggtctgagagacagtttgttataatttctgttcttttacatttgctgaggggagctttacttccaactatgtggtcaattttggaataggtatggtgtggtgctgaaaaaaatgtatattctgttgatttggggtggagagttctgtagatgtctattaggtctgcttggtgcagagctgagttcaattcctgggtatccttgttaactttctgtctcgttgatctgtctaatgttacagtggggtgttaaagtctcccattattattgtgtgggagtctaagtctctttgtaggtcactcaggacttgctttatgaatctgggtgttcctgtattgggtgcatatatatttaggatagttagctcttcttgttgaattgatccctttaccattatgtaatggccttctttgtctcttttgatctttgttggtttaaagtctgttttatcagagactaggattgcaacccctgcctttttttgttttccatttgctggtagatcttccatccttttattttgagcctatgtgtgtctgcacatgagatgggtttcctgaatacagcacactgatggctcttgactctttatccaatttgccagtctgtgtcttttaattggagcatttagtccatttacatttaaagttaatattgttatgtgtgaatttgatcctgtcattatgatgttagctggttattttgctcattagttgatgcagtttcttcctagtctccatggtctttacattttggcatgattttgcagcggctggtaccgtttgttcctttccatgtttagtgcctccttcaggagctcttttagggcaggcctggtggtgacaaaatctctcagcatttgcttgtctgtaaaggattttatttctccttcacttatgaagcttagtttggctggatatgaaattctgggttgaaaattcttttctttaagaatgttgaatattggcccccactctcttctggcttgtagagtttctgccaagagatctgctgttagtctgatgggcttctctttgtgggtaacccgacctttctctctggctgcccttaacattttttccttcatttcaactttggtgaatctgactattatgtgtcttggagttgctcttctcaaggagtatctttgtggcgttctctgtatttcctgaatctgaatgttggcctgccttgctagattcgggaagttctcctggataataccctgcagagtgttttccaacttggttccattctccccgtcactttcaggtaaaccaatcagatgcagatttggtcttttcacatagtctcatgtttcttggaggctttgttcatttcttcttattcttttttctctaaacttcccttctcgcttcatttcattcatttcatcttccatcactgataccatttcttccagttgatggcatcggctccaaacccacaggcaatatcatactgaatgggcaaaaactggaagcattccctttgaaaactggcacaagacagggatgccctctctcaccactccttttcaacatagtgttggaagttctggccagggcaattaggcaagagaaggaaacaaagggtattcaattaggaaaagaggaagtcaaattgtccctgtttgcagacgacatgattgtatatttagaaaaccccattgtctcagcccaaaatctccttaaactgataagcaacttcagcaaagtctcaggaaacaaaatcaatgtacaaaaatcacaagcattcttatacaccaataacagacagagagccaaatcatgagtgaactcccattcacaattgcttcaaagagaataaaatacttaggaatccaacttacaagggacatgaaggacctcttcaaggagaactacaaaccactgctcaatgaaatcaaagaggatacaaacaaatggaagaacattccatgctcatgggtaggaagaatcaatatcgtgaaaaatggccatactgcccaaggtaatttacagattcaatgccatccccatcaagctaccaatgactttcttcacagaattggaaaaaactactttaaagttcatgtggaaccaaaaaagagcccgcatcgccaagtcaatcctaagccaaaagaacaaagctggaggcatcacgctacctgacttcaaactctactacaaggctacagtaaccaaaacagcatggtactggtaccaaaacagagatatagatcaatggaacacaacagagccctcagaaataacactgcatatctacaactatctgatctttgacaaacctgagaaaaacaagcaatgcggaaaggattccctatttaataaatggtgctgggaaaacaggctagccatatgtagacagctgaaactggatcccttccttacaccttatacaaaaattaattcaagatggattaaagacttaaatgttagacctaaaaccataaaaaccctagaagaaaacctaggcattaccattcaggacataggcatgggcaaggacttcatgactaaaacaccaaaagcaatggcaacaaaagccaaaattgacaaatgggatctaattaaactcaagaacttctgcacagcaaaagaaactaccatcagagtgaacaggcaacctacaaaatgggagaaaatttttgcaacctactcatctgacaaagggctaatatccagaatctacaatgaactcaaacaaatttacaagaaaaaaacaaacaaccccatcaaaaagtgggcaaaggatatgaacagacacttctcaaaagaagacatttatgcagccaaaagacacatgaaaaaaatgctcatcatcactggccatcagagaaatgcaaatcaaaaccacaatgagataccatctcacaccagttagaatggcaatcattaaaaagtcaggaaacaacaggtgctggagaggatgtggagaaataggaacacttttacactgttggtgggactgtaaactagttcaaccatcgtggaagtcagtgtggcgattcctcagggatctagaactagaaataccatttgacccagccatcccattactgggtatatacccaaaggactataaatcatgctgccataaagacacatgcacacgtatgtttattgcggcactattcacaatagcaaagacttcgaaccaacccaaatgtccaatgatgatagactggattaagaaaatctggcatatatacaccatggaatactacgcagccataaaaaatgatgagttcctgtcctttgtagggacatggatgaaactggaaatcatcattctcagtaaactatcacaaggacaaaaaaccaaacaccgcatgttctcactcatagatgggaattgaacaatgagaacacatggacacaggaaggggaacatcgcactcgggggactgttgtggggtgaggggaggggggagggatagcattaggagatatacctaatgctaaatgacgagttaatgggtgctgcacaccagcatggcacatgtatacataggtaagtaacctgcacattgtgcacatgtacccaaaaacttaaagtacaataataataaattaaaaaaagaatgaaaaataacaaaaaaaaaacaaaaaaacaaaaaacttccttggataataataataataatttttttctatttgagaatttggaatgttaacagaaaacatgttttctaccaaaataaaggtaacagtgatctggccatctgcattttaaaaaaaaaaaactcattgaaatactcctgtagaatagattgctcacttttccttgcttttgtagttcatagtttttaggaaaaaagtatcttttacctttaaaccaagaagggtatccaaattttgattgaaagcactcctgtacctcggttctcttaagtgtttctgagacatgagtttgcaggtaggaagctggtacggatgacacaactgggacagactggactaagccagcctcatccagctacatgcagctgcttcgcctttgtctccaaaggactcatcccttgttccacattttgaaaacaaccatgcatttacaaagaaattctcaatcttcttgttttctctttaattctctttaaaggaaggaaaaaaattctgtatgccctattcaagtgctatacattggtcttagggactggaactgaaaacttttatgatcaaaaaattttctcctccagttgccattctgttctaaattttactttattttttgatgtaggaatgtttctttaaacatcaagattttagtttccagtagaaaactaatgaattattaaaggatgggaacttgaagcaatctttagtgcttaataaggagaaaccacaaggcttgaataaactgttccatatttctcttttaatgctccgtttaaaatctagacggtgtgtcataagccttttaaaaaaaaacgattgtgtttaccaatatagaatatgagatttttgtttctttttaggtatttttcttgcaattaggatatactttgatgttaccatggctatggcttcacgttccaaacaatgagttttttcttatgtttgattaaaccaaaataatgttagtataatttccctgtaaattattatttgttgacaatcagtgttaatgccactaaaaattgagtataaatatcaacaaagtacattggtaaatgattaacaggacaaatgaaaagaaaaatagaaattctaaatagaattgctatacttctccagaattcattcctcctagaataactccctcagggtgaatgaaaagtcaggtgggcaaagctgtgagctccacctccttcaactatacaaattttgatttggtaaaggaaattttgacctcattatttcaccctgctttgaaccaagtttttatgcacctactttattattgctctttgcatgtacattaaaacaaatattttattttgactttaacctagaatgagcactacagttataagcaattgacacaagataagtctaaaagaaccaaaaaaacatagagtaagattcgtgatagacaaaaagtgacttgctggcaatattaaacattgctaaactcaagcaacgaaaaattaggctaaatattgtcaacagtgtcaaaatgttctccattcataatctattattgatctacgataactaataaatctgtacactgtgattcatgtttttggaaaattgaactcccaacttacacacaatattccagttgcctctgaggaatgaggttataaataatttaaaattttgatgtcttgtttttctttaatagaaaatttattgcctaggtatagtagtgtattagggttctccaggaatcaaaaacaataggcattataaataaataaatatataaaaatatatatttatatttgtatgtgtgtatttattataaataattggcttatgtgattatgaggctaagaagtcctaagagctatagtctccaggctggagacccaggcaagccagtggtataagttctgatacaaaggctagtaggctgaagacccaagaagagtcttgaagtttttcagtttgagtccaaaggcaggaaaagacccatgtcccagctcaacagtcagtagtaggtgctccctcttactgggacttttggtgctattcaggtcttcaactgattggatggggcccactcacattagggagcagagtaagctttactcattctaccagttcagatggttgtctcatccagaaacacccagaataatgtttgaccaaatgtctgggcactccatggccaagtcaatttgacacataagttaactgtcccactaggtaacatatgaagaattgttttaaaaaaagttattcagctgggtagaaattaccatctgtctagaaaatagagttggagaagagaatgaagctgataatgtgcctgaaatcttttttctggcttctattccagtctgagagtcaggaaaagaagagatctctaataaaatgcttctaatgtttgggtcatttttaccacaacatcagtaatggaagagaaagtcaaaagaatgaggctccaggccaggcgcagtgactcacacctgtaatcccaacactttgggaggccaaggcaggcggatcacaaggtcaaaagattgagaccatcctggctaacatggtaaaaccccgtctctaataaaaatacaaaaattagctgggcatggtgccacatgcctgtagtctcagctactcaggaggctgaggcaggagaatcgcttgaaccccgggggcagagcttgcagtgagccgagatcacaccactgcactccagcctagtgacagagtgagactccatctcaaaaaaaaaaaaaaaaaaaaagaatgaggctccaagatgagcacctgagcaccaagcagtcctcatccttctcactgctttggagtttgccagatttgggtactttgatccctagggaataaacactccttagctggacagcaacacaaataactcttaaatgaactgcgtctgttacacacacacaggcacgcatagagtttcaatggggtttattgaaataaagtggcctctacactgaagaattgtaaggactgtattctatccatttcctgtttacttctccatttatttgtattcataggtaaggtttactagcacatcattaagatactgtaaaacagcattaaaatcctaccttttaatttcctcaggtaagcgcctctcttgtcttagcaatgcctcggttctcaggccttgtttatctttctctgtaattgtgagtgaggagctttctgaactggataactgcctctgattttaccccttcaaattcatcttccttgcagctgattgagtgatccctctgaagaacaaacatgattgattgaagaataaacgtgccctcccaacttaaacagcttccaggccgcctcagtaacgtgaggattgagggaaaatgcctcagcctggctcagacagtgcctcccgtcttgggctgcttggctcctctcttcccattcagccttgttactctccagaagtaccaagcagcttgtaggttttcaatgccccaaggaatgtgtgcgccattcttcacactgttcttgctcctagatggctccccacatgctgaaaacccccaccttcttcccttaatgggtttcgatttagtcttcaaggcatgtctcaggcatgttcttttcccaaaagttttctgacactccctctgttaaaggacaaggtgcctttcctctgtcttttggaggaaatttaccagtgatcacactgagcatatatccgatagtctcatctcctcagctataaagtctttggttttagaacctgtattaattcatcttaacatcccctgtgcctaacagagtctaagtgctgagtaaatgggggctgaactaagctaaattccaaagatcaagccaagagttcttagttacttgaaaaacaaacaaacaaacaaacttctgacctttcttcattataatcttggcaaatcagaattcctttgccctaaaataactgtaatcaaggagttgacgctaaagtgatgatgagaactgtagtatcactacactaatgaatcttttagccttgtacaagaaataatagaaaaatccataaccagtttcacagagaactgctaataaaaatcagaaaacactataaatacggcattaaaaaaggtaaaaagctgggctgaagcttaaagatggaaatatttgcagaaaactaaggcagtgagaaatgatgtcctgtatcatgttttgatgtgttatattcatctttctggtgatgactttatttcacatgtaaattaggaaaaagggaaaggaaagcatatccatatcattcatgtccagggaaggaaagtgaagtatcttagaacagcttctcaagtcagctctacatagctgggcttttgaagtgctggtgaattttttttaatctcgccttctacaaagaaataacaaagcttagaaatttaaaaatccaggctactgtcaattctgtgactttccatgaatcagtctcgttattctttgacatcttaaaagaaaacagccatatgactgataatctttggtgaatttcagatgcatgtgccatagaaactgtgaagaaatttaaatcttaaagtactgatctttgggcttcttaaaaaaccttccagttcagatataatgtctgacactaaataatcaacttatctactttactaaaaatggccagtaccccaaactaacactgtaagtttacccagttgggaattttaaattgtggcttactctgagtgcttcatagaagttcccactcttacctccttctgaaaagttttttatgcatagtcacatgctgtgtacctgcattaccttctaatactggtcacattgcattgaatcagggaacaatggctggcccaaagtcagcctgtgggctaatcttataagtagatatggccaatctggcatttatactggagagtaactgacaagccaatcagatactctcttgaagagtttgaatatggaaacacaaataatagagtaatgcccaagcccccaaacagaaaacatatggtggaaagtagaatagagagctcaaggtgggttgctgtagtgtaaaccatcatttagtcatacttaaggtacggtcatgagaataggaaatagccataatgaatgagaagtgaactgctaatggcagagaatgtagactacctgcttgagagatttggtgaaggaaagcaataaagtaatattttagtgggaattatgcctgagagactttatttagagtagactggtagtaggaacaaatttagagtctaaggcatagcttgaagatgaaagaaaaaagaaagttacaaatgtggcatggccgcagaggagaaaactgaaaccaaactgggaagacagagtttatccttagaaagagagaaaaacatcctttctctgacacagaaggaatggagaaaagatagtggaagacactaagaactggaaagaaaatgagtgaaaaggggctcttcttttcccctcttggggactgatcttcagtacaaagaaaagtaagaaatacagaacaagaaaacaacagagaaaaatcaatgaaacaaaaaaatgattcttaaaaacagtcagtaaaactgataaacctctagtaagactcacaaagttataaaacaagaaagaagacagaaatcaccaatagcaataataaaatagggatttcaatacaaattctgcagccattacatggataatgggatactgtgagcagctttacattcataaatttggagaaatagaccaattctttagaaattacaaactaccaagcctcagccagaatagttctataaccattaatgaaattgaatttgcaactgaaaaactccagaggtatgcaatactaattcaccatttgaaagtcaataaatcattaacagagtaaaggagaaaaacatgagtatctcaactgacacagaaaagcatttgacagtatccagcacccattcgtgataaaagctctcagcaaactaagaatgagaagggaacctactcaacttgatacagaacatctacacagaaacccttacagcatatatcatacctaacagggtaagactgaatactttcctttaagatcagaaacaatgaaaggacgtttggcatcattcgtattaagtatggtgctggaagttccaaccactgaaataaggtaagaaaaagaatataaaaagcatatgtattgtaaaggaagaaataaaactgtttctatttttagatgacatgattattctatttaggaaattccaaggaatctacaaaacaagtactgctagaactaataaataaattcagtatgattaacaggatgaaagaacaacatgcttaaagcaattgcatttctgtattcctacgatgaacatgtggaaatagaaatttaaaacgtaaaacatttacaatcactccaaagtaaatgaaatacttaggtataaacctaacaaaaaaatgtacagaatctgtctgtgaaaaccacaaaatgccataagagaaatcaaagatctgaataaatggggagacatactgtattcatgtatcagaagagtcagtatagtaaatatgtcagttctccccaaatttatctatagatttaatgtaattcctatcaaaatacaagcaagatatttttggagcttattctaaaatgtatatggaaaggcataggcccaagaatgcctgaaatgatcttgaaaaagaaacaaagtgagactattcactctacctgatatagctatggttatcaagatagtgtggtattaccagaggtatagacacattgatcaatagaatagaatggagaactcagaaatagacccacacaaatatatacaactgatttttgacaatggtgcaaaagctttgcataagaaacttttcaaaccagcctgggcaacatggcaaaaagtctctactagaaatacaaaaatgagctgggtatggtgacacgcacctgtggtcccagctactcgggaggctgaagagggaggatcacttaatcccaagaggctgaggctgcagtgagctgtgatcacaccactacactcccgcctaggtgacagagtgaaaccttgcctcaaaaaaaaaaaaaagaaaaaagaaaagaaacttttaagaagaaagtaagaatagagggatgaatgcatcttaaataatgttggtgcaattgaacatccataggcaaaaagaaagcctataaaagggcaacttgagggatccttatggcaatgaaatattttctatctcaactggatcagtgtcagtaccctggttatgatattgcagtatacttttgcaagatgttacaattggggaatactggtaaaaggcatataagatccctttgtattatttattgtaactgcatgtaagtctaattattgcaaaaaaaattgctttaaaaattaaacaatattacctaatgaaaaaaaaaaaggagtgagtggacaatcaggaacagagaatggagacttacagccattggacggggtttggaacagtccatgtggaagtacttgtttgtcaactggagatgagtaaaaggattacccacagccgagcactgtggctcacacctgtaattccagcactttgggaggctgaggctggtggatcacttgaggtcaggagttcaagaccagcctggccaacatggtgaaaccccgtctgtactaaaaatacaaaaattagccaggtgtggcggcaggtagctgtaatctcagctacttgggaggctgagacaggagaatcgcttgaacccaggaggcagagattacagtgagctgagattacaccgctgcactccagcctgggagagagagagaaactccatctcaaagaaacaaaacaaaacaaaaaaacaaacaaacaaaaaaaacagttccgacactagtcccactgaggttagatctcatggatttgcagcagaacaattacgtgtatttggaaaagcctgatctcaagatatgatgacttcatatcacatctcgtacatactatactgatattcacagaaactataaactatcagctccaacaccttaaaaattaatggacattccaaagaaaatatacagcatgcactttcctgagcttttgcaaatgcatcaaatgaaaattctattgaaaatatggtcaaataagcacagcatgatggtacaaaaatgtgatgccaaggagtaggagagacagatttctgctgggttgtcttaatctgtgagtgtgtgagagtgggtgagtgtgtgcatctatgtaagttgaggggtaaggaaaggacctttacctccagataaagaagtaatatttctatctacaaagcccacaaaccagattctgttcagtagcattgttttcccattccactaagcccttccattccaatttcaactgcgagatgtgaaatgcagcacattgaagagatactctgaaagtatctagagatcatgcttctattgggaggagaagattaatttgacttaagtttctggagagcagatccattttgtgcatcttaatatcccctccacatttacttttatgtaagaacacacaagtatcttctgagtgactggatgaatacactccttttaatagatcaaactttgtgtctaacatttatcggacttaatggaggataccaaggcatttaatatactgttctttccctaaaatattcataaccagaatttttgcctgtcaccttttctctacaatgacaacttcgctgaagaattagttcaaatgtgtttctttgtttcctcatatactttcatatatgtaccaaagttccatctacaccatatccttggtgtacaatgactggagcatccacagttctatgagctcaaacacctagggtttcagaccaagggcaatttcaacttaggtaaccaaaagcttccaagaaaccctgaagaaatgtgtagtcctttgcgtccaaacattcctgacctgtacagacccatgagcagcaattagatttatttttcagtgttttgaaactaaggagagtaagtaattctggatggcctggtgtgttagtctgtttttgtaatactataaaggaatacctgagactggattatttataaagaaaggagatttaagtgactcacagttctgctggcttcacaggaagcatggcactggcatctgctcctggtgagggccccaggaagcttacaatcatgatggaaggtgaagggggagccagggcatcacacggcaagagcagaagcaagagtgagggagggggaaggtgctacctacactcttttaaacaaccagatcagtctcatgaactaacagcaagaattcactcatcaccaagaggatggtgttaagccactcatgagggatctgcccccacgatccaatgcctcccagcaggcctcacctccagtactggaggtcacatttcaacatgagatttggagggcacaaatatccaaactgtatcacctggttttcttaaagcaatctatttgaacttgtcaattcaaagccaaagacatagtttattattaccatcagagtcactcaatcttgaagatgatagggctgagaggaccagagctgagtccattttccttcctttagtcatcactgcactgaaattagttcagattaaaaagagtgagttctttgctttaaaatttcaaatgacagaggctctcatggaaatgccttcaggagtttcaaagcctccatcattaggtgcagccatccaaggcaaatatttgatacttcgtgaagagaagcgataagaagatatgtgtgtcctacaggatacattccataatggatgataatgttttaaatatatatatatacaaataaaaaccgagattctaattttttcaggtgtttcattagtaaatataaacatttcttccatctcttgaactgtaggaaatacaaatttccttttcaaagactctgttttgcatttctcaacattagagaggcaatattttaaaaggtaactagtgataaaactctctagaagagatggctaggacctagaaggacattttgatccataagccagcaacactgaaaccaggactttcaacccacatgcagctctttaggtaccacatgcagatttgatgggctctctggttacagaaacctggccaagttcgcagaactctgacagctccgtgcctcccactccagctgaaacacttgtgggaaaactgagcaaatggatctgcctcgcaggatcagaagaagtaggcaccagcaattccatggctcttctcttccttgtagttttatttttcttgttatgaaataaagcaaagtaatacaaaatttataaagtacaaagcaaattttaaaaagtaatgaatgctctaaaagagaagtcacttataattccactatcaagtgtgaatcacttttatctttgcatataaatcttttgcaaaagttaaaatagcatgcttatttagaaaactcaactatcacccagcggcaaccattgctaatctattggtgaccacttggtcatctctttattcatacctacacacacaggtatctctgtaatttatgtaggggtcactctctatatcatgccttgcatctggctcttttattcagttgaatttcagagagatctttctattatcaagaaatattaaaaaaagtattttaattgttgcagagaatttctttaaatggacagatagatgttctagaatgtacgcagctaatccttcatttatgagtatgtaggttgtttctaggtttctcttctctgaaataatgcttcagtgaagctccttgtacatgcattcttgtgcttaacctaatagctccttgatataaatttctagaagaggaattagtggttcaattttgataagtatttcaggactgccaaaagaaaggttgtgaggacgtatgctgtcactagcaatacaggaaaagatggattctccatacctttatcagtattactaatatttctctaattttctaggagaaaaatgaaatattaacctcatttgttaggtaaagatgatgggccatttttactggtaatttttcattaatagtacaatcaaacatcttttcagatattcatttaccattttatttcttttgtgaactgctcatttttaaattgtgattttcatcttatttaaaattgctttgtaaaggtttactttatattataaatatacacttcatgtctgtcaggtattgcaaatattttcccaatttgttatttgtcttttgatttatgatgtccttttactgtatacaagtttttaaattatgtatatattttaacaccttcaaataacacctagtacataatttcatatttggcttttgcatttttaatattgtattgcttttgtttttccttgttattcagagttctaaaaaatattttcatgaatatataaaatatattttaggaatgtaccattatttcctcaacattggctatattgatatttctcaacactaatagtgctgtattggaggatagtgaggcgatgaagagagagaaagatacagaggaagagagaagtagctgtaattcaaaactctagtaagaagagaaaaagcaaagtgaaactgtttcctttatcactattgggaaagggacaaagagttagcaaaggcctgatagtgatatcttgaaaaaaatgaagagaggcatgttaagaaaaagtagcccctggggaaaataaataattctttcttctgagtggcagagaactatagcacattcaatttgtgtgttttagtagacttataattttaattaagcctctgggttttttctttgtgcttgtcccttttgttttaatgggacatgaggtcttttctttttttccttatttgtagggtccccagtgacctctattgcattttgttactcttggcaacaataaaatgtatctattctctttaggcttgtctaataagtggcattattgcattattcaagcatttaaatttgattgatgagtttatccataaggttgttcacaaatctgttaaagtcatttattttttattctgatataattgtgcatgccattattaatgctgctttccagaagagtaaccacatgttgtagggcctaatttcaggttcaaaatggaaagtggtgatcttctcaatgtgtgatttattggaggaaaatggagcttgatggggacaatctgggagtacatggttgggagggaacccccagatagacttcatgttactttgctgttactcaacagtttgcattgtgggacttccagtgccagtcagggtgaaatatagtttcacattttactaccacctctattgtttctctctcttttctcttctaagaccagggaatagaacataaaggtcgacagctttatcctaatctgaattgttttgaatactgcacttgtattttcatccttcattgatttttaatgcaatgtgatgtattatagccatattcattacggtgtgctgcaccaaaattgtgcttttggaagtgtggcttttaataaaaggaaacacttgtgattatttgtgccatatcagctgtgtcacaagtccttaatatacgtaattcagtaggggttcttttcccaatttcatagcaataaaggtagcacattggctccattgccttacttaggtttcagagttgtttggaaacattaaggattctgattttagtttccatgccatttcatttacatcagatgagtgagtccatcccaaaaaatgagttgggtacgtatttggacagctacaataagtgagaagggtgccttattttgcaaatgggcatgtctactcctgcctagcctcatcatctgtcacctttgctctttagaatgtggcttcttgccaccctcaccctactatccccacccctctgcctgaagctgattaatcacttccaaggctgtttaggttctgttccacacctacactgcaaagttaaagtgtctgtctcccttatgtgcactttaaggacaagatccgggcctgtcatctgcatttcctccagggcttgctgcttaccatagagtccagcacaaggtaacatttaatggattcaattaagtgagcccaatgtcaccatcttagcatattgagccattaatacatggaattgattgttaaaatacggaggccagcttccttcaagccttactttctttcaaaaatatttgttgaatacttgctgttttggcacagagaacatagtggtgagatgatagaaataatccctggcttcagtgagttacaatctcatgaaataattcattagtcttgtttctccaattcacatcctttcaagtttcaggttgggaaaacaaatcaaatctcccctcatattaaaaaaaagtaaactaaaatactgcctctagatgtccaggtgcagggactcacacctctggtcccagcattttgagaggccgaggcaggaggatggcttgagcctagaagttggagaccaacctggccgagaccgtgagacctgttactataaaacattaaaaaatagaagggcattgtgttgcatgcccgtagtcccatctacttgggaggctgagacaggaggattccttgaactgaggagtttgaggctgcagtgagctatgatcatgcctctgcactgcagcctgggcaataaagtgagaccccatctctaagaagaagaaaaaaactgcatctggagctttgctacttggatcatagtgtagcagagatgcatggtatagagctatcctgtgcattacgatagctgctagccacatgtggctgttaacactgcagtgtgctaggtctgaattgagaggtgctgtcactgtaaaatacataacaggtcttgaagatttatatattaaaacctgttcatcatctcaataatttttagattgattatatgtagaaataatatttttgtagtttgaatttaataagatattattaaaactggggccaggagtaggggctcatgcctgtaatcccagccctttgggaggtcaaggtggaagaatcacttgaacccaggagttcaagatcagcctaggcaacataatgatacctcatctctacaaaaaaataaaaattgaaaaattaattacacttggttgttttcatatttttgtgggattacaagataaaatttgaaaaatagatgtagcttgtgtttgtggcttgcattattttgctatttgaaagtccaagtatagagtgaggcacagcatagactggaggcacattgcttcacttcaaatcctgatccttccccctactcgttttgtggtctttggcaatttactaaatctgtctttcattctttgtcttatcatcttgtaaaatcaagatagtgatagtacctaactcaaaatattgttatgaggatagtttatatgtctaaatcatttagaacagtatctggcatagagtgcatactcttcaaatgtttgttgaataagtaaataaacccactggtcatgtgcaccttcactcagtaggtagaattatcaaagaagtaatgcagtttttaagtagcagtttcgtgaataacctgtatttttctaggagcaatagtagcaattgtagactgacatggtgaacatttttgatggtttattagtttaatttccttctcctcactttcttcctctctccagaacaggtggaaggaaaggagcaaaactcaaatatattaatttcattactctctagtaggctttttgggagaatgattctgaaatggatggcaagtcaggaatttttttcttcgcattatggcagtttcctgttactttatgtaggtaccttgaaataaatctaacatatgaaaactcaagcttctatgttacagagtggattctttggatccattgaagagcattgtcagcagccatccagacacctccatgtattcatgtattcattaactagagaagagacactttgaagtcaatcaaaatttaaaatatttatgaagcctatatataaagggaagatatattggttgtggcagagacactcttaaagtggcctccaattcttgtctcctggtgttcacacccttgcgtgggacattcctcttgcaagtaggcaggacctgtaacttgcataaccagtacaatatggcaaaggggatggaatattcatgatgacacatatgcagtaacatgaaaataagatgtcagcacccatccttctggagtttctcctttgcttgatggctttcagaaagtatgcagccctgttgggggacctgcatagcaagagacttctggcagcttctagtgactgaatgtggcctctgccaacagccaacaaaacactgccaagaattaagttctcccaacaactggattaagcttataagtgaatccttccccagtcaaacctctgatgagaccacaccctgccaacaccttcatttcagccttgtaagaccctatcagaggactaggtatagtagtgccaaactcctggcccacaatacatatgtgttcttttaagctgctagtttgtggtattattgttattcatcaataaataactaatacactggcatttttactttcccaaatttaacctccaagcatattttatggcaaaagcaagacatatgcattgaaattattgggtgatttttccttttcttctttttactagcatcagagggatttaagtatatgatacttagcagtagaatcagtcactatatttataatatttcacagcatttaaaacagtatatacaccaaagactttaggttggcagacaatgattcagttattcatatgttgatctgatataactatgttgttaggaatgtatgagacacatatatttgggtttctgaagacagatatgaactgaagacaattttttcaagttattagcatcttccaggtggtagttggaatactgaaatggattaaatcacctgatcatctgtagacattaaagaaggctaaggacagagtccctgaagtaacaacatttaaggatcatgcagaaaaagaatcagcaaaagaaaaaacaaaccaggaaggtaaggaagatttaggagagtgatgtcagagatggaaagagtttcaagatgaagagaatacgaaaaaggagaagcaaaaatgagacctgagttaattggatttaggaattaggaagtgactattgacttcagcaaggtggagtggaagttggatttcagtgaatcactaagttaggaataaagaagtagcggtgaaatattcacttaggtaataactaaagggagacattgaactaaggaaagagttttccttaaatgatgcaagagatgtttatgtctgttggccttgacaagttaccagaagaggttatcatatgggaaaggaaaagagtaattgttaaagtgaggtccgggggttgagagggaatatgccgagtggcatcacaaagaattagcttgagatggaatagaatacatctttctctgactagaggggaggaaactagcctacatgaggaagtagatgcgtcacaggtgtgggggataagtcagagaatgcacatgtcttcaattttcccatttgctgagagtaactagggtagggttgagtagggctttaggtaagtatgtaagtaggtaaaactgctgatggtaattagagggaaagctcactaaacacaaatgagagtcttgctgagtagaaatgaacttctaaggggcattgagaatttcaccaaatctgaaagtaatatcattatgaaatctcccttggaattaaaggtgaagagatttcggtttgtgtccagcaaagtgagaaacctgaactggggaaataccctgcagccccacttccaagctgttgccaaggccatccctcttgcacacatgcagactttgctcatgcctcttggctgacaaactaggcttgtgttgtattttaccttagtatagttagaggaagaaaaaattaggattagttcttcagattggaaataaggaattccatatgtaggagatactctttgcaatggggtgtggcatgcccactttcttcactagacagtgtattgcagctttgctttcttcttcctgttggaaatatattttcagtcaccatccctgttttcccccaatttaagcgaaacaggcaagagccatccctcatcgttctctgagattgcttcttttggaaactgcacacattatatttcttagaggtagcttttttaaaaaagaagaatctaagaccatgaaactggaatttttgtccatttaatttcttaaatggaatcctgaaattttgtgtctagggaaatggtctataaaaaaggcatcttctatatctagatgatctgtgtatgggtggagctctggcaatagttactacaaaggtcgacattcagatcttctgaaattattacagcagtttattctttcatttagtatagtgatcaaatacctgctatctgcctggtgctattctaggctccagataaggacccctgcttcagggagctaacattgttgtatgcatgcagaggggaaaaggaaagggagtgaacctgaaaataaacaaatataatatgttttaaaaaaagatacattgaatcatgtttaagtatgaacaaattaaaatgaagagaggtgatggacaaaggctaggaaaaagaggctggctttagacacctaaaatctacagatttcagaagatttttgggttgtgaccagacagctaaacagtctgtgagtactttggcaagaacataaatggcgtaagaactgctgtgtccatatttttgaaagctgactctaagtcaggagaaataactatcttctgtgaacccgggagaagagacgtatccttgacattagctgaggtcagtatggccagtcaattcttttctctgccaaaaaaaaaaaaaaaaaaaaaagcccagaaagtaaggaaaacaagagggcaggagcctcatagatgaggaaaatcatatctttaaaacacagtttcttgttgataaataatcctcttactgcactggcaacaggactctctcctgccactccccctttgtcttacattcttaatcagttgattacataccactaaaaatacacataatgccacttcctcctttcctgatcacagccacaaacctccattttccttttttgttgttgtttgggcttttggttctgaactttgtgtttttaactacatttagagtctgggaaatggaggtttctgaggttacctttgaaacatctttgagtgacaggctccctttggccacacagaatatcaagagtggaataaaaagtgtggattcagttcaaactccggtagcttttttcaactcagaaatggaatctggctttgactagccccagggaatgtaaacagaaccttacctgtaattaacctagggcttctcttgttctcaatgcaaatggagttacaattgtatttctcttagtagaatagaaaggctgtgtttcagaggggagctggcagttgaatagaggacaagttatctgtctaactgtgacagctctctcctatctccttctagaaaagctgaatgatgataaaactgtagttgcatttgatgtaagacatatggtaattactataataatattatcacccgggttctgcagtggctttgtcagtgaggtgcaatttcacatattgtctgcgataaaatccccgtttttggttattgatagcaatgcctttctcaaatgctataggtattttgtgacagctgcgaagttcctgcttcatatccaggtaattgggttgagaataaggcctgcatgctaaaacctgccgatgtgagaagtagtgaaagcccagggagtactgtgaatattttggtagttattaactgactaaatgggaagcctttgctagtcagtgcttctgaagcaatcctagagaaaaagaaagaaaagaaaagaaataaaggcaatctcctttagaaagcctctgttgggtcttcaatgacgatgtgcaaattttgagctaatcaattatattatgaatctatagataatatttaaaagctatatacagattcacaaattaattgctttcatgtcattctgctattgattgtttcataagtcaaattttacttggcttaattactggtttaatagaagttatttcagcataataagtatgtgaccatgtaataaacatttttatttatttgtcacagaaggaattggttctatagtatattagcctgagcttagctgtatatatttaatttcatggctgtttccagggaactgaattttgaagacactaacagcatgttaaaatggactactataaatccttttttggaaatacgtgggaaataaataataaataacgacagtgtgtcaaagtgattttattgcttagattaataaaaggaaagtaatacaatgtctggataggggaaaaaatcagattatggggttttttccttgttaatgttatcccttgtgcagaattcattttttaaaaatcccaccaaagacccataaaacagtgagctctattctggagttattatttaggcaccgataatcagtagtggcaacattcagtgagtacgtcagagcatactcttgttgaatcaaataaatatgtatatgtaaaggtgcagattacaagttaattctactatgaagtgctaaataactagaaataatgtgattaatttggggataaaattggtgttgtattggttggttgttatgatttaaattccttggttaattcctttttttcctcataaaggggaaattgcccagtttttgaataattgaactgcaaagttagcacaaaaactgaagacctttggccctagcatttatagaaaaacacttgggatttctataaaaaacctatagcaatgtggtaatttaaatcattttgatgcaattcaattcaagggttgcaattattaaatgcctgcaaagtccagacactttctagcccttgggatacagcgatgaacaaaattaagttctacttccatgagcttacactgattaggcatggcttctgtgccagattatgggtataatataacatctcaggaatacttgctaatgacacaccagatgaagctgagattctgagtggccatttgttactaagagaaagaaccaagaattagctcctgtttgactccccaagcactctgaaccctagtgtagtggaaagattatcttctgcagaagtaaaaatattctggatttcccaaaagaagtttgctaacataacaggcaatagatacctctagttgggtggcatattttgcacacgtttgttaactcaccgtattatttccttcttcaaattgttctttgactattttccaagggtcttagcatttttacattcatttgaagctcattatacaattaaggtattatgcctttttcatgtgtactataactagtgttcccacctatgattttctttattttgttggtatatacctttttaaagcaaatgtctgattcattgtctttaatttggagcaacagacttatcttcagatggaagtaaaaactcaacttgtagcttattttgttgttcatagtctaaaatgtagtaagaaaaaggtgcaccccaagaataatggccagtgtgaatgagcccttcttcttggagaaaagatcatgggccagtttcacagaaggacattctttctttgagattttatacacatgtgctattgaaatttgaaggagaagaaatattttctatggcgtagttccctttgtagggtcaacccttaatttacagaacattattataagataatacgatagtgtttgtgaggttgtccaaagggaataaattttataatcacttatcttttgaaattgcattaattgttgaactactgataatgaaattttgatactaaagattttttctaaggcagaggttatgtggtcatgtggtggaaggagcattggactttggactttgtaccagaggatgtgggttttcacttaaaaatgaggatatgaacctgatgatactaagactgaaaagacaattcaagtcaggagactggaagagaagcagggtgtgtgtgtgtgtgtgtgtgtgtgtgtgtgtgtgtatgtgttagaaaggggagctataagagacatattttggatacattcctcagagatgccgtgttgagatgttttgtagataactgaatatcatctacctctcaagagagtggtatgggtgatagaatataggtctgttaacaacatagcagcactaatagaagccaaagagaaaaacaaatgacttggggagaaggtgtgaaatgcaagccctaaactgaccctgcaagtggtttttattattttccttgtttcttttggtttttgatgtttgaacatacatcttttctcaaagataaaagttttgcaaaatcacacagtaaaaataataggacttatggggaaaattgggatgtgacagatcactcaaaactcatagatgtgtaagcataacactaacaaaaataacaataaccttattaaattatcagcacccttaaaaagcatgttaacttcatgatgaagtttttagaaggaaaatatttgatagcttactggaagatggtgtaaggaagggttgaggcgtctgagttatagaggaaagagcagaagcaaacactcaaggcacttccaagtcagaatacatgcacacataaaggaaggatggaaaatggatgcagtcagctggctagtgcactgtgtgctcagctgctgttacttgttggagcaagatgttaggaccgtgagaaaaaccactgtgaacctgtacctcacactgatgttagccccattgttaccagaggagcacatgaaagaaacacttttcttttcctctgacctgcctggccaaataatatttataattcattactttcagtaaggacaagagaacagaactctctgtattccaatttgaacgccttatgactagggtatcaatatctatttgccacaagctccaccacactctattgtcttacatcccctcatctcctatccatttcacacacgtatgtttcctgtcggatttagtttgcaggcccttgtgtagggaagaaaagaacttagaggaaaaggttacatttaagggtaggctctaagaactgatcattagaaaggtagaaagagcatcgagaagaaaatgttagattggaaacaaaaggaggagataatttcagagtagagttgtgagtataagatcctgcagagaggtccattgagattatggcatctctccagtaagacagcactagtacctttggtaagaaaagtttttgcatggtgtggtgaaggcagagccaggctgccatgccagggaaagggagcagcaaagggtgaagaaaggaatatgctccactctttcaagaagtttgatgtggaaagaaaagagaaaggaggactggctgcttttatagggagacatgctgaaagagttttctttgtatggcaaggaacacttaaacgtatcatttgtagatggaagagaagtagctactggggaggaaaagggaaatgattgaagatgagagagcaagagtaagagaagagactaaatagaacaactctccagagagcttatttccattacataattcactccacaaatgtgggctcatctttgttgcatttctagctccttctgactggaagtgtgatttctagcaatatatttatagaatctcctctgccccccttcaaacacttttcaataaatgctccgtgtggttcatttgtaaagctatctctactgtagtagtttctaccagaagacatctacagataatgcaattcaccaagtcagcatgaagggttgaatccctggaacaactaggaatttttgcaggctatttctgctgtgacacagccctgaagtggctagcagatattcagcctgagtggaccccctttattactgatctattgcctgcctaattgtgcataacattccaaatattattaatttttaattatttacgtttaattatctgcattacttaagcattcgaattccacagctaatgttctcaatgaaatatttactaaacagtcaaacctcttggattccacagaattaaatgttttcaatttgcagcaaacctttcctccaggaggcattctttgcactctagtgttctggaggtggctgcagtctgggtggttatggcttcagccttaccatccttttcatctcagggacactgtcaactctaatgggatggattgctctgcttggcattagcattaggaggttgagtgccgttgggacactcgtgccatctctcttcccacttctcttctgttagggccagaaaatgcattaacaaggagccagttctggcgataggaaagcgaaacaacattattgtggtcaaaaggcagatgtggtcaaaaggtcaagaggcatgatgaaaactaataatagctctgacaagagaagattactcacagctgatcagccagaaagcttttccagagcaaaatcaggacccactgtcgatggaaatgctgtttccagaacagaggccaaggaaacaggattatccaccccagcattcctgacataaatattctcacctctattatcctttgtacagaaggagggggcccatggtccacaaaatgtgaattggtttcagttcattttctaggagtggaaatggacagaattgtgctaatgtacctatgctcactaacggtgtctcccttctcaccaactacaaatcactgagagggttgatgatgtgatctgtacgcatagtggttaagactgagggatatacattagaccttcattcattccacaactatttactgatcacctgccgtgtgccaggcactgtgctaggcacttgagagacagaatacagcaagacaaacatagttgcttcctttatggaacttatagtccagcaaatatgagactccctggatttgagtcacaatggctgcctcctagctgaatgactttggggaacttacttaacctcttcagacctcaatttccttatctttaaaaccggaataatcatagtactttcctcatagggcagtatgactattgaattgttgatatgtgaatgcatgtgaaactcataaatcataagattggcacttacagcttgtttcactgggttgtagattaggtgtgcatgtatggtttcactaaaagcttgtacttgaggcctaacaaaattagcaatttaattatgagtgtttaataaacgctataattactggacacgactctaagtagcagaagatatggccggggcgagcagatagatgttagagagtacaactttctgagtttgggtaacaagaagacacattagtcttatacctggcatgaaataagtgttcaataaatgtttattgttgttacagttgtgattatcattattaggccctgagggcttcatattaagctgaaattcatgtgagtttgtgcctagtaagtaaaactgacatactggagcactggcgtggtacttgtacatgtcaaatagtaactgttagctgatgcacacatgcagacccacacaagcacatacatgttagtgtgcatttttattgcaggctattaaaagcatttgttaactagaagggaccttagaaatgatatagtatggctccctcaggatgatgaaactcgagacctggagaaagggaagcaacttgccaggccacacagtgagtggtaaaccagggaccaaaatctggttctttgccccagctagagaaagtctgctggaccccaccctgcctctcttctaactactttacatcatgtgcaataacaatgacagtaagtaatatccacaccccgctgacagtctgcaaacgcctttctctttcatggcaagctgaattagaagctttggagtgtactgattttgccttctctgtctcaccaccttcctgccacctgtctttttgcattcctgatgaaaataaaacccaaatgcataaatcatatgactgatagtcataactggtttctttagattgctgtagctaagttatgcatgtatagattcactgaaaactttttttgacacctcataaaattagtatgtaaattgggggtaaaattgaatacccccaatttaaattgctgggcacagctctagttagataatatttggagacaaggcttggagacaagatgtagccagggtgaccagatgtcaggattgagaactctgtgagcttaggcaatgggttcaatgttttgaaattccttgttcccacaagcctcataaatactacctttgtgccttcttaaatacacagtgttttgcttagctgtttgcatcaggcatgtaacaggcggcaatatttagaaagttagagggcagcaccttccaaaatggacctggatttacctttttatcatgtttttctcctgctgaggagttcacattatcacttcatcattgattgtttttgtgtgaggtaatccatagagttttgcttgaaccccacaaattgaattaagagaactagctgctgttctcccttgctacagtgggtggctcccccaaaaatatcccacctcctaatcactagaacctataaatgtagcctttttcagaaaaagggtcattgcagctataataaatttaaggctcttcaaatgagattatcctggattacccaagtagacctgaaatccaatgacaagtgtccttacaagagacagaagaagacatggatacagagaagaggagaaggccatgggaagacggaggcagagactggagtgaggcaatcacaagccagttatgcctgggtcacctgaagctggaagaggagccttcggaaggagcctttggatggagcaaggcctggccaacaacttgatttctgatttctggcctccagaactgtgagagaatagatttccctcgtcttaagccaccaggtatgtggcaatttgttacgactgcctcagaaaactaatacacctgccagctgcaaggtggccctcctctgaatgcgaggtgttagaagggacagtgtctctcagagtcaattctgaaaaacactagttgtgtgggtgaagagataggcgggccttaaatggcagaaggagtgagtgagatgaaagtatggagaggccagacatgaaatcactaggcggattatttatgtatttttctgtacgggtgcatcacttctaaaagtattgtttgtttgcttgttttcacacacttgcttccatttattccctcttctcatgtacatggtggaagaacactcataattggccttttgtcttctaacctgtaacataagaacaacttgaacttcagaaccagccattttggcatgcagtattcctgaaattggttttagttatttcaattaggtatttaaattagcatttgtttctcttttaccattcattctcacacattggtcacatgaagtgttgatgttcttttaggtttgggaagttcacttgcagtagataaatcagtcacctaaaatgttactgtccaaaatcattggagcagttgataccgccagtatccatgactgactgcgttccttcatttggtctatggagatacttatcaagccctgtatgtgccagacactgtgtctggaatgaagtgaacagtggggcacagaacagatatggtttggcccttctggagctctaagcacagcagcacatcttctagatcttggctgactctggagttggtgttgcccaagatctcttcaggatctaactgagttggttttgtcttagactcttctctctcccaggctgaattagataaaccagactccaaaaggcagctggatgaggtcatctatgggtttctggggatgacgtgtttggcagaagtcccctctcctgtcattctccacctccacagacatttagaacagctctatccagctgcatatctagacagaacttgactcgacatccacagtatctgatttatactgaatttgccacagatacatagaatctgaagtttcccttctaaaggggtattttgagccataacaaattccatgaaaaacaactctatgtcctccctaagtgataacaatattaagagtggaaattgtcactcacaaagagcttgactaacaaattcccattctttcttacaggcaacttttgtctcctctccttcctctagccacagttaatgtttgctgagatgtaaattcaccctccactgctctaaatatattagaggtatcaattcatttgttcttcatacaaccagagataggtgctattattcccattttacaagtgaagaaactgaggtaaagttacttgcccaactttcaaggacattatgtatgagttgggactcaaattcagatagtttggctctagggtccacagtctttaccattatgctagactgccatcacagaatcagatcaacatgcattgttaatctatctgtgactgatgattgtttagccaatcagtaaccaaactgcaaagaaccagagttcttcgactacaggtactaatctctctactctgagccatgtaaaaaaataattgtagaagagagggaaattaaaaattaaagtgtgggggtattgcattgaagctgcacatttacgtgagttaagagtccctgatcacagagcaccctctccaaacaagcctcccatctcctgaaggatgagaccccactgactgacttcgaccacagaacatgcaacctttgaaacatttccagaaacaatacagtccttcataacagtgtaggaatgaagctatctaattccctgtatcagccatcagaggtacaagtgacatgaaagtttaactggaatctttttttttccttatgtctcaatgcatactttgcacttttaattcagtattgtgtcaagttcatacatctaattcatggaaactacttataaaatatgaagacacattagcaactaagatttggttaatacacatttcaaatgttgttggatttctttggagtacaacaatacctaaatgttgcattatttaaccaatgttggggtgtgggtttgtgcacatagggttcccagcaggtaatttatctagtgatcatgtcctgatgaacacaagggccctattgcaggcaaatcaaaagaggtaggactatgtcccaagtgttgcttctcttaccccaaggttgcccaatgcaatagttttcattctggtacatgcaaacatgtttcctctaaggtgcaatgccagaaacctagaggaaaatgtgtcttggttttatctgagaaaactggcaacaattcctttggaattgattccttttctttttattattttaaagagagaatagatggttattataccacttacgcagctaacagtttgtaggtcaagatgacctagagccaagaatgtgatattcattatgatacagcatgaaaaagagaaagttctgtttgtaaaggatttttttatgaagtcacaggcccaagggagatgagtacagaaagctatttagggtaccaagaataaattggatggccccctctctattcccttttttaatccccctaattatttattctgcaacttctcccccaacaagtatgtaagccacattagggccgggatttttgtttaatgtggcatccccagtgctggtatgtactctgtattaaaaatatattaatgaatgagtgaatgaatgaatgaatttcatctgaagaatgagccttccagacgaattccttgttaaaataagccagcacattgtctataaagcagcttccttgattaaggggcaaggtctcaggttaacgtgagataagagtttctgatttcagcatccagccaaatgatactgttctttggaacgcactctcttcttccctccactagtttttcttccctagcatttgttttggatctgtagttacagcattttctgctcagaattcaactgagggaaaaaaaaatgtgttttgagtaatactcactaaggtgaaaatctgaccatattttgagaaataaggggtttggaggctcaggacagaccatcccactgctgtcttagggacattgggctgctggagcctggcccaaagaaggtcttctgggaaatcaggactgagtctgggcaatgctagagtcagtgggtaaaatggctttggagtgtggcacacatagtaacgctctgtggaaccctccatattgacctgagcctggcctgatctatgagtcatctaaacctaacaaaaggcatctagaggacttggggttaaggccgagttattcttcaagtacacaattatggttgccagtaaaatgaatttcatgcttgaggtgatatttgtgggagaaaaaaaaaaggaagattaaaaaggctgtgtcaaaatagtgttttgattagaccagaagcatcattctagaaaatgcaaaatagtaggaacgcaataaaacaaacaaacagacaaaacccaaacaaacaaaaaatgctttgggcatgcctttcaggaatgaacgatgaaccaaagtcataaatcatccccctctattccctatttttcaggtgttatgtttctctattttgtagactttcatgttctacattgtgaaaaaataactaatgcacaatcccatatatttaagcttgtatgattactaatatttgtcatctttttaatttgtagaggatatttaatttactcttttctggaatatatgataatcctgtgctttactttctcatgaaggagagagagtaaaacaataagcaccttggtttaaaaagaactaattagcaagtttccctccggttctccaggcttatggcaaataactttcttcctgacaactgaatgttacatcccaacctccattagtcttaatagaagtcatgcattctctcccacttgctgtgatataagaataatttttcttctgagtagaataatggttgtgaagtcatttaggtagtcacagaaaaaaatagccttttattgttgttgttgggttttctttgattccgggaatgaggctaagagaaaccttgttccattttaccgtaaatactattaatccagagatgagtccttagcatacagaaatgattgatttgcatttaaatgagtgaatattcagagtttctagactcagataaaacatcaaaattatccagtgaccttggctaaattttagagttaactacttaggtggcctaaacaaaagcttgtattttcagcacacctaccatatgaaaaaaaagactaaaagctaccttccaccatcctgatgtaaattagacaccgaaagtatacactttacctccactattattgatttattcatttctgacctcgttcccaagacagctcactcatttcctccaccaggtccaggaccaatatcttactttaagtaaaaagttttcactcagaaaagtctggttgactattgtatttgacaaagtagaaaatagagttatggtgctgttttaaaagaactggggaggtctgattcccaatctgcataataaggctgtctttagcactgtgcattagcagcaagtaattacctccaactagaatgaaatgagggtcaagaatggttccaagtaatccagtggaagtgttacttgctttattgaacatgctaatacaaagctgtatttggaagagtcaaagaagaaaaaatgccccaaacccaaattgccttatgagctttttcacaagagcagtccagagtggtctgtacatgataaatttaagagttgcggttgtttagttttaccactttaaattaattcacctaagaatttaaatgattttgggcttctgcttttgtgtctaaatttaatgatgcattctgtgaatataaggataaacacacacagatttttatacatgtaactgacctattttcaaataggtgtgcctattcctgaataaatagattgatgtcctaccagattacaaattaagtagatacgatttatatggttttagtatgtgaaagtattagctgattctaatttcttcttgtgaaatactaagcgaatgaaacatacttattaaaactcaaactgttattgacttatagtcatccatagttctaatctgggtgggtgacaattcaaagtcataacaataatttttttattagcagcaaattagctttgagaacaaaaatgcaatcagctccagaattcatacatttttttctttcattagacattaaccaaccaaagtttagggtgaatatgttttatacatctaggtcaatgataatacaaagaatgctagcctaatagcaatatcttgagctttttaccccactaacatacagcagaaagcacgtagaaaataagctctttcaacgaaataagtaattagaaatgacggactgttcagatttaaatttgatgataattatttaaaaatgacagaagtattggaagtttatcattcaaaccaccttaaaagtttttcctagtatacactacaacaacaacaaaaggaacattacaaaaactaagactttgagaggccagacatggtggttcacacctgtaatcccagcactttgggagactgagcgggggaggattgcttgagctcagaagtttgagaccagccttggcaacatagagagaccccatctctaataaaaaattttacattagctaggtgtggtggcatgtgcccattgacccagctactcaggatgctgaggacactgagtggggaggattgcttgagcccaggagttcaaggctgcagtgagctatgatcacgccgctgtattctagcctcggtgacagagcttgaccttgtctcataaaaggaaaaataataataagacgttgggaaacttttaaagcagaagagaaaatgtgggcatatgtataacttcccctcaaatacctctatcctatgctgacacactcatattcctaagaaagatagccggagaggattgccagacaaatgcaaactttttttatcctgcagaagtttcctgtcctgcattcttgccttcttatcatcctcagatgagaggagcttaatacatcagaaaagtcaggatacagtaggctatgtttcagtaacaaataaaccccaaagagcgaattgtttaacacactaagtttattctacactcaaagtccaaaatgaatcagatggccctcttccatcttatagcctgcaaggttgctgtgtcaagaaagagagagctaaaagtttccatgaggcgtgtctataagggccaggtttagaagtgccttgtgaaaccccccacctttgcatgcatcagggcctagccatgtgatcccaacctaaggcaagggagattggggagtgggtggcccacaagaggatgtgaagtggatcttaccactgtctctgctgcgggagaccttctagctcccttaagctcatctggcttaacagccagctctgtcttctctcctcagggctgtgctgtgggccctctgattctctagaaccaacatcccttcagagaaagagaacgttcagtgaaagaggaagagagagagatggaatgacagcactagctctcatacaaagtcccaaaagcatggaattccagaatggaattcattctgcacatcattttcttcaagtggggagagagagagaggtatgggagtggggacagagagagagagagagagagagagagagagagagagagaactactgaaataagaatttacccttatatttggaataagtaagaatataaataagaatatccttctcactctactttccttcctcccacataactactcccaccatagtgaatatgatagagtgtatatctgatttctttactccaaaaagatatcaagaaccttaagctttctttctgagccactcctcactaagcttatcctcatttcttaaagtataactatagctgggccattttacattctactgaatattctgtgacactgtggtcatcagcatgaatgacactttggggactcatctaaccaatattttggatgtctcccaagtgccaagtcttgtactaactccatcctgaggctgtgcttctctcaaagagcttgtggtctagctggtgtcatccaaatactgacagatacattacaggaaacacagctactgttgcttgtaacccacaccctgaggtgtgctgccaggtatgtgctcagccacacatcacacacaaaaatgccttctgaggtaccagttgtgtactgctctagagtaatcacatccaagatgggatggcacatacattaaagaccaaagctttgctcttctcatgagtgttaagaactgggaattcgtttcttcccgaggccaattctcacagtcttgatctgtcagaacttactggggttgaggagaaagatgatgttctgaacatggcctgtttgggcctgtttggggctcagttttgccatcagagatgttccttgctggcagtggcactggcccacaatggatagagctggcgtgaggagtggaagctgtaaaccaggacaccagaagttgccctttttagacccagctcttccactaactcactctgtgaccttggaggtgtccttttggcctctctgagctccagttttcctcatgtgtaaaatcaaatgtttggactagacaagggctctttcagctgtgacaccctgttattctgggcatctgtgttcctgcctctgtaattgaggtcatcagtcctatgtcatactgggtctgcagggaggatgaattggagcagagtcaccaggttgatcaactcgagaggcatccctcccacagtgactcaccaggagaaaaaccattagacccatcacctctgggacttgttgacactgattttcgtttttttctataacttctaaatgctcacaaactgaagaaggcaataacccttttttagtcagtgcagctaccaaaatggaaagaaagtacctttgcacctgtcgctgagctagcctctccaaaatgtacttagcccattgctgaggaagtctgtgggtttagagagaggactttctagaagacagagccctgcctgtcactggaagcccagcttagcatgaggggacttgtcacacagtactgtggaattacacacctttagagctgccaataagttcagccttctcctcaccttcacacagatttcttcacacacattttgcacacagggaagtgaagcccagagaggttgattaagccaaggtcatgcacggtatgaaggactgagatgagaactggcatcttctgactcctgactgttaggccagtgctcttgcactctaccgtgctaaataattcatagacacatgaatctggtatcaagaacagtgacatgataatggtacagccaataatggtagttacatataccacatatttattttacatgtatataatatgtgtattatatgtaatatatattctttagtcccaacttataggtaagaaactgagacacgtagagatgaactaatttattcatttggtgacatacagctcagttgttccattgaagcaattttttaagtgcttgtcatgagcaggcattaaactagtcactatgatggaatttagagttaaattagagctctgccctcaaggagatgatagtaatgtataacctaagccaaagacatgggtaacagttatataagggagagatgggaccgatgtcagaagacagagctggctagatttggggaaactcaaagaaagggatgtatttttttttccagattgaatgggttagaggaggaaagacaagggtagaggtaactgaactgaatctccaaagaagtgtaggttgtagggcatagaatagggaatgaaaagccagaatgggccaaaaatatctgcatgaagccaaacagcacatcagttgacaagtttgttctttgacaagtgcgcagccacaaccaagggatagcaagtgtaaaatgcttagtagtaggtgaagacgaggaatgtgactaatctcacgaaccacctgtgataaagaaatctttgctttctgattttgttacaccaaaaaaaaaaatagaaaagccattagaaaacttgtaaacctggtatctaaactacaagcaaattgaaactgacccagctcactgttaagagtctctttgtgagggaaaccagagcattttcctgtaaagtcaacagggtttacagttgtaataggccattgattctgaatacacaaatctgaacaaaccacggatcaaatcagtctccctgaaagatggcagcttcaaaaggtaaaagccagatgcaacagagttaacctccatcaccactttaaagaggagcagagctgtgattgtctccactgaagaacaaaatgaagattgggtttaagccagtgttgtgctggtaaatatttgaacactgactgtttaaaaatgtgtgtgtgtcaaggacagaaaaccaaacaccgcacattctcactcataagtgggagttgagcaattagaacacatggacacagggagggaaacatcacacactggggcctgttttggatctgtagttattgggagggtcaggggagggatggcattaggagaaatacctaatgtagatgacaggttgttgggtgcagcaaaccaccgtggcacgtgtatacctatgtaacaaacctgcacatgtaccccagaacacaaagtataatagataatattttaatgaaatattaaaattaaactgccaagaatgtatatttaaaaaggtgtgtgtttaagcttattattaattttcccaataaagagcacataatttacaaataacaataaaatgttcagtattctttgttctaaattccatgtacccaatcgtttctttaagaatgtttttattgatttttgccaaattattgtatctatagctaacctatgggtgcaactgatgaatgaatatagtcccaaaataatatggttagtatttttggttaccttagtaggtaagaagaaggtgaaaccaaaaagacctgtgttggaacctcatttgctcctccataatattagtaacttccttactgaatcaaataacagttttcaaataatagaccaccactatttttccagttttgtgctgctcatgatgtaatgtctacaaacacagcacactttgaagtttaatatgtaatatttacattttctccatccatttctaataatcaacagtatagcaaatcaagtcctgattggtggtgtttgcttatttctatgatataatacttccttacagctggtttccagctcccaatgagatatcactgaatgcagagctggaaagagaggtaccgtagcaggccttatataacattttcactattatgcactgaatatgtgcgtgtatgtccccaagtctatatgttgaagccctgacccccaatgtgatggtatttggagaaggctcctttggtaggtaattagatttatgtaattaggtttagatgaggtcacaagtgtggggtccccatgatgagattagtgaccttataaaaagagaccggagtatcctataacactgtagttaaatatgaacagaattaacaataatacatagatttaaatagctagaatgaagatattgaatggtctcaacccaaagaaatgatcaatgtttgagatgatgggtatgccaattaccctgatctgatcactgtccatcatgtgtattgcaacatcactatgtaccccataaacatgtacaattattatgtgtcaattttttaaaactaaaaagtttaaaaaattaaaaataattgtagaaaataaaaacaccatggtcacaaaaaaataaaaattaaaaaagaaaccagagtttgcacttgtgcaccccctcgcctgccccatcaccataaaggaacaccctccctgtgcttcctctttctattgttaccacttactccccatcctctcacaactactaatctgttctccatctccatagttttatttccagaatgttataaatataaaattatacagtacattaacttttgagatgacttttttcactaagaataataccctagtttcgtctacatagttgcatgtatcatttcttttatttctgagtagtattccattgtgcagataaaccagaatttgtttaaccattcacccattgatagacatgtgggttgtttccagttctttgctgttatggatagagctgccatagacatttgtgtattttgtatatagattttatgcgaatataacttttcatttttctgggataagtgcctaaaactgattgctgggacctatgattggcgcaagaaacttccaaactattttccagagtgcctgtattattttcctttcccaccatcatgtatgagagatcaagcttctctgtattctcaccagcattttgtgttgtcactgttttccattttagcagttctaattgctatgtgctgatatctcattgtggttttaatttgcattctctaatggataacgacgttggacatctttttatgtgtttatttgccacctgtatcacctctttggggaaatgtttcctcatgtcttttacccattttctaattggagtttgtttctttactatacagttttaagagttctttatatattcgagatgtaagaaatttgtcagatatatggtttgcaagctttttctcccagtctgtaacttgtcttttcattctcttaaaagagtcttttgcagcataaaagtttcaaatgttgataaatcatatatcaatttttggtgtcatgtctaagaactctttacttagatttacatcctgaatattttcacttatttttaaataaaaagttttagaattttatattttcatttaaatccatgatccattatgaattaatttttcatgtggtgtgaggttttaaatcaaggttcatttttctgcccattggtgtccaattgttcccgtgttgtttgttcaaagttatcccttctccaatgaaatttttgtttttaatataattcatttcattataagttttaaaaataatgcttgtgcgtaacaactagctcacaaaaatttaacaatcagttctgggagccagcacagggtggctccagcactttattggtttaaactatattgtatgttattgattaggagggaaaaagtagtcatatggatggttagaaatgatgagtgtttacctaaatgcccatcagtgatagactggacaaaaaaaatgtggtacatatacaccatggaatactgtgcagccttaaaaaggagcgagattatgtcctttgcagggacatggatggagctggaagccataatccttagcaaactaatgcaggaacagaaaaccaaacacttcatgtcctcacttataagtgggagctgaattataagaacacatggacacatgtgggagaacaacccacactgaggcctgttggaaagtgggaggggagggagagtatcaggaagaatagctaattgatgctggacttaatgccaaggtgctgaaatgatctttgcagcaaaccaccatggcacacgtttacctgtgtaaaaagcctgcgcatcctgcacatgtaccccaagcttaaaatagatgttgagaggaaaaaaagaaagagtgagtgtttgtaaataaatacatatgtaaaacattataagaacataagggcccagaggtagcattagtatcattttgtagaaaattaaaactcaggtttgaaactcacattttactagcctcagagggaggaagcaggaatgggatgtaattcatgctattactttgaaattgcttaattaatagattattttcaaactaattgggtggccaggaagcttagtagaataatcatggcctctgtggtcaaatggagctgggtctgaaccttggctctgacatttaccagctttgaggaaatgccttattcactatcagtttcccttagtgttaaaatggagagaactccaagaatcaaaagctatattcattaatttaacaaatacttgatgagttctggtctatggagaagggattggggatacagcaatgagcaaaacagtcatgatttttgccctcaaagagtttacaatccagtgaagaggtggacagtgaacaaataagcacattagtgaaatggtattaccattgtgaaaagcggcatgaaggaaaaaaagcagatgtagtggtttaaacagacaaacccaaaacttagcacttttccaagcacacagagtttgctcagtggcagctattcatattactgcagattagggtacgattagtgtggtccaggcagaggtttggaggcctgtctggggacctgaccactgtcatctatgttgcatactgtaatgctcattttgcacatcaatctgaattggatgtgcttcaaggtcctcctcttactctaaaaatctgtgttccttaggtgtgtcaaacagggattagtttaatttcttacaaaaggtgagggtaaattcagcaatcagtatggtagtaattgactcagttgctatatgtgtttacattttaataatgtttttctgtgatattccccactcatgccttttttaacatagagtaaattatgaaaaaagacttagggagctagaatcctaggacaatgagatgactctgaaagtgtttacaaactttacttccaactactggcacacattgagttttgtttggaagtaggttattattaatcaatgtttttttgtaatgaagtccataaatccacattaaatacacatccagacttcttgaggtccttttgattttgcatattttcatcagaataattcactaaactcaatctgagtctttttcattttaagtttttgctgattttctactaagtgtcctctgacttattgagcaaccagtgcagcattggctgcctgggcagggaaggaaacagcaggggttatataggaatctgagtgattctgcttcttggctcttgttcttatggtttaaaatagaaggaataatcttttcaccactgtctccaccacctccagttttcagtgggaagatgaggagtaagaggtacatggttagttattttctgtttcccttctctaatttcttttattatcaaattggtactgccttattgtaggaaattgggaaaataaaaactaaaaaagggaaaataaaacttatctgtaatgttactgttaggagtcatcgtctcccatactttgaaaccggatatgataattccataatttcagggttagactctattaaagtctctacttatgcctctacagcactttaagaccaatagaggaagccatatacctaagtgaggcccaagatccagaaaaaaaaaaagaaaagaaagcataggtaagagccatataatgctgtgttacaggaactattctaaatacattgcaaatatgtttcttacaaccacactctattattaccctcatttttctatagtcacaaaagcagtaagaggtagaacctgaattcaggcccagtaagactggctccagagtccacaggctaacaaactttgtaatactacagaaagctgagtaaccatttccaacttccctcctcccctagctcattccctcctgtgggaagcctacactttcattgtttctttgtctcactcatggcccaatatttactttgttcctattttgacttgttgtgtgatgtctgtcactcctgtcagtggaggaactgttttgtcccattattctctttctagaactttccctccactcacttctactgaaggccagctgtatttccatgacctgccaatacaactcacaaccatctcctccaaaaatctggtagttttacacagtaaccaaagtcacatacaatctttagcatagatttggggaggagggagggaaatgattaagtgcggtgtttaacatggggttggggaggttttgtgaggtcactgagggtccgacgactccttcaaaccatcagggagataacctctattgattggtgtatttttcttgaatttttttctatgcatacacttttctaaagtttattttatttatttttattttacccaacttgtaattttgaaataactcaaacctggagaaaaatggaaagtattttaactgaagactttttacctttacctactatattagtttcctgggactgctataacaaattaccacagactgggtaacttaaaacaatataaatgtattgtctcacagttctggaggccagaaatcttaaatggaggtattggcagggccatgctccctctgaaggctccagggaaggatcctttccttttcctaccttctggtgattgccgacagtccttgggttccttggcttgtagaggcattcctcgaatctttgacatcacatggcacttggcctccttcctcatgggtctctctgtccctcctctcttcttataaggaatgcaattgtattggatttagggcccaccctaattcagtatgacctcatcataatttaattacatctgcaaaggtcctatttccaaataatgttacattctgcagttctgagaggacattaattttggtggatattatttagctcagtacacctgtagtcaccaattgttaacattttgacacattcgttttatttttaactccaactgtccacccacccacccacccatccatcctcacacacacagattttgttaatccatttgaaagtactagacatgacactacacccctaaatacttcagctgctggtatctattaggcaaaataacattttcgctacataaccacaatactactattatctcatatttaatatgaatcccataatatccgatatagagatcatattcatatttccccattttttctaaaaacattctttatagctgatggatttttcccccacaaatcaagattgaataaaggatcaaacattgcacttatttattatgtttctttaatctccttttagctagaaggatacctcgctttttttaatttttcatgatactcatatttttgaagagtccaagccagttgactttgagaatgtaccatattctgggtttgtctgatcatttcttcattattagatcagattaagcatttttgaaaagagttccccgcaggagacgctgtctactctggttgcctgacatcctgaggctcatgatgcccgtttgctctgctggtcatgatgccacatgtgacagctttgctggggtggcggcaaccgcttctctgcacagtcatgcacattgtttcccagtcttttcaactctcgcttcacatcgtctttttatttgtccttttttcttcagagcttttggatttctgattagaagtgtttagaaaatatctgtaagtgcttttttgtacacatttaactcagtccggcagtagtgttagttttcttccgctatgtagttgtttggaggaaaaaattttcacctgctgaaatgttttgactctcattttctaaagttttatattgactttgtggggatgtcatcactgtttcatgttttaattatcttgcgttttcctgtaccaacaaaaccagatgattctgtgtagacagcaataaggttttagagagacttaattgatttcttggatcaagaacactgtcttctgttgacacagtgaagttttttgttgttgtttttttgttttttaatagtagatggcacattttgtgtgatgggatgggggtggtagtgtgctgtctcttcttcctgaacaacccttaatttcatgatcatggtatctcccctgccaggtaagtatgtcatatggcctccttcctcattggtctctctgttttgaatgcttactttcttctgcttcaccatctaggctccaagggcacctcctctcccaaaaaagccatgcctggacctgcactctcaagcctcctccctttgtgccccagtagctctgatccaccaggtcattgacctttctctctttatcctctcaggtgtgacattttcttaccgggaatgattttatctgtgctcttccacttgctaggcctcactgcctcctcctctgcctcctcctctttgccaagcattcaccggctgactttcggctccagcaaggccttcagcgctggctctgcaggtgtcagatttttatttccccacctctgtgtaaattcagatttgtagcattctcagtctcttacttatgttgtagacaggggttatgggtggttttatttgctatccttgttcatctctgtaggtttcagagaacatgtgtggagagatccatatttaatgtctagaaactccaagcctgcatatatttattcttgctgctttgatgttttgatgtaaatacaattatatatttcacattttaaaattctgacatggtatagtataattgtatctatctttttctctctttttgtggtttgctttttacatttaactctttcattcttctggaattattctttgctttggcttgtttatctagaccttctgttcttgcctatgggcacaatagaacataaggaaacatggcctagtttgcttagcaatggacagatgcttagagaaatgaggggcaagctttggccttgtgcaaatgtggtggatgcttgctgaagcgcagagtggacaggaccagggatgatctgactgtgagtttcttaagaaagttgagtgttggtctcttggcacttgaggctctcatttctgcagagtttgtcaaggaccaacggcccatcaaatctggctgcttgtcagatgcttcagaacagctttatgtcttgtcacattcttagtcactggcttatgccccaaattctccactaacgtttcagcttctcatgagcagtgactacttccttgtctcagaggacatctagctggagccttgcccaaagtgggttctcagagacaattcagtcacctttgaaagcttctatcctgagatcacaaaaggggttacaacaaaagcagtgtattttcctttggagacggataagaaaagaaagacacctgagcgggagtgggtagaagaagtattatgcagcctctatgaggcctgaccctttgacagcctcaggtcctcttcattttcttcaataccccacttttaaatatacactatgttggtatattcaccagtagctatcagggaaaattcagccagatatcgggtgaaattcacccccgatatttcacgtagtttcttttctattttccctaagtgtcagtcggtctgagaaataaagggacagagtacaaaagagagaaattttaaagctgggtatccgggggagacatcacatgtcagcaggttccgtgatgccccccgagccataaaaccagcaagtttttattagtgattttcaaaaggggagggagtgtatgaatagggtgtgggttacagagatcacatgcttcacaaggtaatagaatatcacaaggcaaatggaggcagggcgagatcacaggaccacaggacggggcgaaattaaaattgctaatgaagttttgggcacgcattgtcattgataacatcttatcaggagccagggtttgagagcagacaactggtctgaccaaaatttattaggcaggaatttcctcgtcctaataagcctgggagcgatatgggagactggggcttatttcatccctacagcttcgaccataaaagatggccaacccccgaagcggccatttcagaggcctaccctcagggatgcattctctttctcagggatgttccttgctgagaaaaagaattcaacgatatttctcccatttgcttttgaaagaagagaaatatggctctgttccgcccggctcaccagcggtcagagtttaaggttacctctcttgttttctgaacgttgctgttatcctgttctttttcaagttgcccagatttcatattgttcaaacacgcatgctctacaaacaatttgtgcagttaacacaatcatcacagggtcctgaggcgacatacatccccctcatcttacgaagatgatgggattaagagattgaagtaaaggcaggcataggaaatcacaagggtattgattggggaagtgataagtgtccatgaaatcttcacaatttatgttcagagattgcagtagagacaggcataagaaattataaaagtattaatttggggaactaataaatgtccatgaaatcttcacaatccatgttcttctgccatggcttcagccggtccctccattcggggttcctgacttcctgcagaaagcagccacccagatcctgcccgaagttgcccataaagcacttttggagaggctagattatggatccaattaagaatccctgtactgcaaattctaaagttctggcctagagtcctgtgagctatcctgcttacaattgttactagcagcacacacatgtctctggaatgcgaagaagaaagaaaaaaagacaaggaacgtgaaaattgggtgatgtcagcctcccttggataaagcccatcaatggttttcattgtcttggggtgaggaacaaatccttgatagaactaatatgatcctccatgatctgcccatgccgccttctccagcatcatctgctactccaactcccttgctgcctgtgcaccagcccctggcctcatttcagtttctcaaacattctgagcttctttccaccagagggtgtttgcatatgccgttcccactcccttgaatgcagctactccctctttttccttagttaatgcttggatatctttcagatctcaggtcaaatttcacttcttcagaaagtcttccttgattgcccctgttaaacacacattcttgtagcaactggtatttccagggtatttcttgcagttgtaattttacatcttttgcagggtccttttactaataatgttcttctccctaccccaccaggctacaatttccatgaatgcagaaaaagagtttatttttgccaaccattgaaatccatgtgcttaaaataaagactggcccacagaagatgctgaataaaatgtttgtggtatgcatgaatgaagtgattaatgtaaagcaactggtgagggctaaatgtccaaagtgaaacaaacactgaacaatcatgtaggcagataaacagttggctgattttttttaagaagtgattctttggtaatctctgacaaagatgctgatacaactgaatatatacatagctgagagacagatggaataactaagatgaaagttgaggaagaagattgaacaaaacatgataaaaaattcagagctacttgctggttgtgtctgaaagtagtgttcatttctagtcatatcgctgccataaggagttgaaagacagtgaggagaaaagcctaagaagggcagcatggatgaccccagattaaatgtcaagccactcacagaaagtttagagacttacagtggaaagtcaaaaggacttgaaggagatgtaattacagattcaaagctcaatgactgtatgtgataatgtcacctgctttcattttaacagagacctatttacacaatgcagatcctaaagtgcagatttggaaaattccaagtaaatttatgaagggtttttcaatagcaacaaaagaacctaaaagcatagggtagtggaaggtattaaagttgctatgtgagaagaaacacttgaatctgtgaatgaattctctttcaccctcactctctgtctctgtctagtgcatgtgcacacacatttatattttaagaaaagtatttttagaaggaatctaacaaagagatggtgttaatttggatcttttaaaccaaaatactacatattcattttgcattttaatcagattttttcataatctgaaagaaacagatatatggctgctgttttccactcattagtatattctattgactccaaaactaaagggagatttataattctttactgtttaccaagagcattgaaggaaaaagctgaacattgactttttttatagagttgttatattatacttcatattggtatggagatggaattggcttctcaaagcatcattcttgaaatatatctcttcctccctatagaaaatttgtgcataggattaccagggacatttgtggaagatctggtgagaatagaaaaccagggaggtgggatgactaggaacagactgagctaaggcagggttaagtgagaccctgatagtaaagagagattgcctgttagctagaagttattgaaatacttatcacattaaagaatgtggctaaaggctcaaatagccatattttttccagctagaaaataaatcaaatttaacatgaccagcccacgctttattgataatagactaagatcacacagcgagtgctctggctaataggattgctgtgcagttacaaccattgctattacagcagatacagttctgcctgcaaaggcaccatggaattgtgcatgaccaaagacttgagttgtcctgaatgtctttgaccttgaaaagaggagataaatgggactgagcaacatggggactaaggaagacattcaggacagacctgaattgaagaatggggtgtccaaatcacaagcctggtctggtttaggtgaccatcatatacagaatggattgggagtcttaatttagtaggcaggtggagctgccagaagcactcaggctgcttctcaaaagcaggtgaatactttatgtcctcttttgtccatttccacctctacatttgtggtagacagaacaaaggtccacaaagatatccatgtcctaatccccagaacctttaaatgtgttaccttaccttaccaaataatttaccacgacttactaaaagggactttgcacatgtgattaaggttaggggccttgagatggggagataatcctgtattattccattgtgaacccaacctaatcatatgaatccataaaaggggagaaccttttcccactgaagttgaaatcaaaaagagatgtgcccccaggagaatggtaagagaaatgcaatgtttttgaagatagaggagggggccatgagccaaggaatgtgtgtggtctctagaaactaaataaagtgaggaaatggattattttttggagtcttcagaaaggaacacagccctgccaacactttgatcttagcccagtgaggcctgctttggacttgtaacctacagaactttaaaatagtaagttgtattgttttaagcccctgtatttgtggtaatttgtaacagcagctataaaaaaaaataaagtctcttaatccaagttgataacgccacttgtctgaagtacttactgcagtaatcttacggatttccctgcttccagttctgtccttccacaacccacaattgttcagagttgtcctcttgaaaaataccaggtcagtgatatttcgtggctcaaaactatccaatgaatccatggcccatagcatgaaacccagaattctaaatggccccttttcaacctcttatcacactactttctctctcatgggccccgaagttccccctcagagataaagtttctgatttttataattgcttgcttgatattttttcataacgtgactgcctaggtataatttgattttgtcagtttcttaaacattatataagtaggataatacagtaactattttttataattattatactttaagttctagggtacatgtgcacaatgtgcaggtttgttacacaggtatacatgtgccatgttggtttcctgcacccattaactcgtcatttacattaggtatttctcctaatgctatccctccccctgaccccaccccatgacaggcctcagggtgagatgttccccaccctgtgtctaagtgttctcattgttcaattcctacctatgaatgagaacatgtggtgtttggttttctgtccttgggatagtttgctcagaatgatggtttccagctgcatccatgtccctgcaaaggacatgaactcatccttttttatggctgcatagtattccatggtgtatatgtgccacattttcttaatccagtctatcattgatggaaatttgggttggttccaagtctttgctattgtgaatagtgccacaacaaacatacaagtgcatgtgtctttatagtagcatgatttataatcctttgggtatatacccagtaataggatggctgggtcaaatgataattctagttctagatccttgaggaattgccacactgtcttccgcaatggtggaattagtttaccaccccccccaccaacagtgtaaaagcattcctatttctccacatcctctccagcatctgttgtttcctgactttttgattatcgccattctaactagcgtgagacagtatctcattgtggttttgatttgcgtttctctgatgaccagtgatgatgagcattttttcatgtgtctgcgggtgcataaatgtcttcttttgagaagtgtctgttcatatcctttgccctctttttgatggggttgttttcttcttctaaatttgtttaagttctttgtagattctagatattagccctttatcagatgggtagattgcaaaaattttctcccattctctatatttcccattcactctgacagtagtttcttttgctgtgcagaagctctttagtttaattagatcccatttatccagtttggcttttgttgccattgcttttgatgttttagtcatgaagtccttgcccatgcctatgtcctgaaaggtattgcctaggttttcttctaggatttttatggttttaggtctaacatttaagtctttaatccatcttgaattaatttttgtataaggtgtaacgaagggatccaatttcagctttctacatatggctagctagttttcccagcaccatttattaaatagagaatcctttcccatttcttgcttttgtcaggtttgtcaaagatcagatggttgtagatgtgtggtgttatttctgaggcctctgttctgctccattggtctatatatctgttttggtaccagtgccatgctgttttggttactgtagccttgtagtagagtttgaagtcaggtagcgtgatgcctccagctttgttctttttgcttaggattgtcttggcaatgtgggctcctttttggatccatatgaactttagttgtttccaattctatgaaaaatgtcattggtagcttaatggggatggcattgaatctataaattaccttgggcaatatggccattttcaccatattgattcttcctattcatgagcatggaaggttcttccatttgtttgtgtcctcttttatttcgttgggaagtggtttgtagttctccttgaagaggtccttcacatcccttgtaagttggatttctaagtattttattctctttgtagcaattgtgaatgggagttcactgatgatttggctctctgtctgttattggtatttaggaatgcttgtgatttttgcacattgattttgtatcttgagactttgctgaaattgcttatcagcttaaggagattttgggctgagacgatggggttttctaaatataaaatcatgtcatctgcaaaaagggacaatttgacttcctcttttcctaattgaatacctttatttctttctcttgcctgattgccctggccagaacttccaacactatgttgaataggagtggtgagagagggcatccctgtcttgtgccagttttcaaagggaatgcttccagtttttgcccattcagtatgatgttggctgtgggtttgtcataaatagctcttattattttgagatacgttccatcaatacctagtttattgagagcttttagcatgaaggctgttgaattttatcaaaggccttttctgcatctattgagacaatcatgtggtttctgtcattggttctgtttatgtgatggattatatttattgatttgcatatgttgaaccagccttgcatcccagggatgaagctgacttgatcgtggtgcataagctttttgatgtgctgctggattcagattgccagtattttattgaggatttttgcatcaatgttcatcagcgatactggtctaaaattctctttttttgttgtgtcactgccagcctttggtatcaggatgatgctggcctcataaaatgagctagggaggattccctctttttctattgatcggaatactttcagaaggaatggtaccagctcctctttgtatctctggtacaattcggctgtgaatccgtgtggtcctggactttttttggttggaaggctgttaattattgcctcaatttcagagcctgttattggtctattcagagattcaacttcttcctggtttagtcttgggagggtgtatgtgtccaggaatttatccatttcttctatattttctagtttatttgcatagaggtgttcatagtattctttgtatttctgcgggatcagtggtgacatcccctttatcatttttattgcatctatttgattcttctctcttcttctttagcagtcttgctagcagtctatcaattttgttaatcttttcaaaaaatcagctcctgaattcattaattttttgaagggttttttgtgtctctatctctttcagtgctgctctgatcttagttatttcctgcattctgctagcttttgaatttgtttgctcttgcttcactggttcttctaattttgatgttagggtgtcaattttagatctttcctgctttcttgtgggcagttagtgctataaatttccctctacacactgctttaaatgtgtcccagagattctggtacattgtgtcttttttctcattggtttgaaagaacatctttatttctgccttcatttcattatttacccagtagtcattcaggagcaggttgttcagtttccatgtagttgtgcggttttgagtgaatttcttaatcctgagttctaatttggttgcagtgtggtctgagagacagtttgttgtgatttctgttcttttacatttgctgaggagtgctttacttccaactatgtggtcaagtttggaataagtgcgatgtggtgctgagaagaatgtatattctgttgatttggggtggagagttctgtagctgtctattaggtctgcttggtgcagagctgagttcaggtcctggatatccttgttaaccttctgtctcgttgatctgtctaatattgatagtggggtgttaaagtctcccattattattctgcgggagtctaagtccctttgtaggtctctaaggacttgctttatgaatctgggtgttcctgtattgggtgcatatatattaaggatagttagctcttcttgttgaattgatccctttgccattatgtaatggccttctttgtctcttttgatctttgttggtttaaagtctgttttatcagagactaggattgcaacccctgcttttttgccttccatttgcttggtagatcttcctccatccctttattttgagcctatgtgtgtctctgcacatgagatgggtctcctgaatagagcacactgatgggtcttgactccttatccaattttccagtctgtgccttttaattggggcatttagcccatttacagttaaggttagtattgttgtgtgttaatgtgatccagtcattatgatgttagctggttattttgcccattagttgatgcagtttcttcctagcattgatggcctttacaatttggcatgtttttgcagtgtctggtacaggttgttcctttccatgtttagtgcttccttcaggagatcttgtaaggcaggcctggtggtgacaaaatctctcagaatttgctgtctgtaaaggattttatttctccttcacttatgaagcttagtttggctggatatgaaattctgggttgaaaattcttttctttaagaatgttgaatattggcccccactctcttctggcttgtagagtttctgccaagaaatccactgttacactgatggtcttccctttgtgcgttacccaacttttctctctggttgcccttaacttttttcccttcatttcaaccttggagaatctgattcccttccaaaatggccaaataggaacagctccagtctgcagctcccagtgtgatcaacgcagaacacgcatgattactgcatttccaactgaggttcctggttcatcacactgggactgttggacagggggtgtagcccatggagggcaagccgaagcagggtggtgcattgtctgaaccaggaagtgcaagggttcaggggatttccctttcctaaccaagggaatccgtaccttcgccaaagactgtacctggaaaaacaggacactcctgcccaaatactgtgcttttccaatggtcttagcaaacggcacaccaggagattatatcccatgccgggttcagcaagtcccactcccatggagccttgctcactgctagtgcagcagtctgagatcaacctgcaaggcagtagcctgtcagggagaggggcatctgccattactgagccttcagtaggtaaacaaagcagcctggaagctcaaactgggcggagcctaccacagctcagcaaggctactgcctctgtagactccacctatgggggcagggcatagctgaacaaaaggcagcagaaacttctgcagacttaaacgtccctgtctgacagccctaaagagagcagtggttctcccagcatggtgtttgagctcagagaacagacagactgcctcctcaagtgggtccctgacccccgtgtagcctaactgggagagacctcccagtagtggccgactgacacctcatacaggcaggtgcccctctgggacgaagcttccagaggaaggattgggcagcaatatttgctgttctgcaatatttgctgttctgcagcctctgctggtaatacctaggcaaacagggtctggagtggaccaccagcaaactccaactgacctgcggatgactgttagaaggaaaatgaacaagcagaaaggaatagcatcaacatcaacaaaaaggacaaaaaaggacatccacaccaaaaccccatctgtatgtcaccaacatcaaagaccaaaggtagagaaaaccaaaaagatgaggagaaaccagagcagaaaagctgaaaactctgaaaaccagagtgcttcttcctcctccaaaggattgcagcccctcgccagcaacagaacaaagctggatggagaatgacttagaagagctgacagaaataggcttcagaaggtcggtaataacaaacttctctgagctaaaggaggatgttcgaatccatcacaagaaagctaaaaaccttggaaaaagattagatgaatggctaactcgaataaacagtgtagagaagaccttaaatgacctgatggagctgaaaaccatggcacgagaactacatgactcatgcacaagcttcaatagccgatccaatcaagcagaagaaaaggtatcagtgattgaagatcaatttaatgaaataaagcgagaagagaagtttagagaaaaaaagagtaaaaagaaatgaacaaagcctccaagaaatatgggactatgtgaaaagaccaaatctatgtgtgattggtgtacctgaaagtgacggggagaggggaaccaagttggaaaacactcttcaggatattatccaggagaacttccccaacctagaaaggcaggccaacattcaaattcaggaaatacagagaacaccacaaagatactcctcgagaagagcaatcccaagacacatacagtaactattttttttagtatgactttcactcaacagtatcattaagaatcatgtgttgcatgtagctggggtctgttcattttcattctaataactcacctttgaattctttttgatgtgttatgtaatttgtagcactacataatttgtagatgatgtgatttacagataattgcatcatatgtaaataagaaaatatttttttttccaaaaccacttttatttcttgttctttcttgattgcactgtaaatgacctcaattatgatagtgaattgaaatggtaacagccactgtttttatctcattctcaatttcagaaagaaatgtttcagaaggtcattattagggatgagctttattgaaagttactttttgttttgtttagatttgtagatagcattcctcagagtaaggaatttctctcctgtttgctaaatatttgcaaaattaaaaaattaaatgtttgctaaatagggtgatagacccgtgatgcgtcgtgatgtcttatttaaggggaatgcgtgggcaatcttagtttcatggccgtgaggtaggaaccagatgccggatacagttcagtatagctacccccaagtgttacgggcccagagcgaggagagtagcacacttgcgtgggatattgatttcacggaggatggtgagtgagaaaccactaaatatttgctaaatattttggcatggatgaatgttgaaatttatataatgatttttctatatttattaagatgattatatcacatgatttttctcttttaatgctatgatcttacaaaatggtttctgttctttccaattctatatttttccctgttttttgccttttgttcaattgattgcatagtttttattattccatttcgtccctctatgagtttataaatcatatactctttcagaatactcacattagtgtacagttgggcaaaatcatccaacacaaagcctgttttgtattgaataccgtactgaaagtgaaaaaaaggatagttctattggtaatcaaagtataatttccactgactcagtatcactttcacaccatcgtaaagtcaaaaaatcttaagttggagactgtctgtagacacattgttcaataaatatcagaaagtgtaaaacatcatacaatgaaaagtccttttcctgctttagacctgcattcatccagtttccatccctctcaacataatgtgttactttttaaagttttcatactgatctttcccgaaatatttcatgcatatgtaagtcaatataatcattttgtattagtctgttctcacactgctaataaataaatacccgagactgggtaacttataaaggaaagaggtttaagtgactcacagttccacatagctggggaggcctcacaatcatggtggaaggcgaaggaggagcaaagtcacatcttacatagcagcaggcaagaagagagcgtgtgcaggggaactcccctttaaaaccatcagctcttgtgagacttattcactatcatgagaacagcatgggaaagacctcaccctgtgattcaattgcctcccaccaggaccctcccatgacacgtgggaatgatgagatctacaattcaagttgagatttgtgtggggacacagccaaaccatttcaaatatgttactactcttccatttttaagtaagtgatacatactttacacatgattatgcatcttcctttttaccttatatatttaaaagcatttcatagctacacatagaaaaatctttattttttcaataatgtatacgtttgtcccatattatatattatacttaaatcagtcccttacttataacattttgtgttgtttctgatcctgtgtttttataaacctacaaacataatacagatgtcattttgcacatgagagttattatctgtagaataaatttctggaagtggagtgctgagtctacaagcaggtgcatctgtcatcttgatagataatgtcacttgccctccatatgggttataccattttgcactcccatcatcaataattgagtctgcttatttttacctatcctcacccacagtgcctaatacatttagatttttgtcactttgaaactaagaacaataattctgtgtaactttttttttgtaattatgagtgacagtgatcatattttcataagtttaagagagatgtgagattgttcatctcttttgcccatttttccattggtctgttggtccttattgatcaaaaaatgatcattctctagcaagggtattagtcaattgtctgaacaaatgtttttcctagttcatgaaatgtatttgaattttttgatgggtagggtttttctgctttgtgttatttgcttgcttctggttttgtttggtatatagacaatttttctttgtatatggtagaatttttcataattcctacagtgtttgtcagtgttcttcagacaaacagaaccaataagatatatataattatataaagaaacttatttaaaaggaatcagctcatacaattaaggagtttggaaaggccaaaacctgaaggatggcctggcaggtgagagacccatggaagagtggatgttgtagttccagtatgaagattgtctactggcagaatttcctcttactcaggaagcagtcaggtttattattattattattattattattattattcaggcaagtaattggcccatctaccttatgaaggttaatctgctttacttgaagtccactaacttaaatgataatctcatccaaaaacaccctcatggaaacatcaagaataatgtttgaccaaatatctgaggactgtgacccagtcaaattgacacataaaattaactatcacacaccctttatggcttctgaatttttgtgtcatttttggaagatccacccccactccaaagttataaaaaaatcccatttttatctctagtgcattatgatttcatttttaataggtatatcttaaattctcatgaaatgtttcttgtgtgtgtaaccagactcaattgtccaaatattgtggattcaatataatcatgatcatcttcttctgatttaagatgccaaccttttcctaaagtttcatgtgcatttagatatctttccaagttttatgttctgtttggattattagccttattatgaaacagaaccagactgctttaattattgaatatttatagaatattttaatttctgataaagttagtctttgctctcttatttggtttctttactattctagtatataagaataaaaaaacaactaattttattacactaaaatgccatgtgccatactggtgtttctattagattcaaattaaaattacaaattagtgaagattgacatcttttttaaatcttcatttctaaaaatgtagtatgtcttttcatttgttgaagtattcttttgcttttcacttttttttttttttttttttttagaaataaggcctcgctctgtctcccaggctggattgcaatggtgcaatcatagcgcctcaaactcctgggctcaaagtgatcctcctacctttgcctcccaagtaactaggattatagacatgcatcaccacactcagttgattttttaaatttttttgtagagaagaggtttctcttcccaggcaggtctcaaacacctggcctcacgcaattctcccaccttggtctcccaaagtgttgggttccaggcatgagctactgtgccaggcttcttttgtattctttagagctatttcagaagcttctttcttcttgatataagtctgtaaattttcttggtacatttttgcatagttattttattatttttgttgctgtcataagtgtgggtctggtgtgaaggttattgaattctgtatgttagtttataacctgatacatttctgcattttcatactgcttgcagtatgaaatataagataacagtcttataatttcttctcttttccaattttcatatctgtaagttttttctttctttcttttttttttttttttttttttttttgaggcagagttttgctcttgttgcctaagctggagtgcaataacgtgatctcagctcactgcagcaacttccgcctcccgggttcaagttattctcctgccttagcctcctgagtagctgggattacaggcatgcaccaccatgcccggctaattttttgtatttttagtagaaacggggtttcaccatgttagccaggctggttttgaactgctgacctcaggtgatctgcctgcctcagcctcccaaactgctgggattacaagcgtgagccaccgtgcccaggctttctcttaaaatttcatgagattctaagtctagtacgttattaaataataaagttaatacttaatatccttttcttatgaggatacttctagtatttctccattaattttaacactagctttgggatagaagtagatacattatcccatagttaagctactattcattgatgattattttcttgagtgtttataaagaatggatttggatcattcaaatgattttttgtatctatggagattattatattactttcccttactgaaataaaagttatatctatatatttcttgatattgaacaccacctttccatatctggagtaaactgcacttggtgagagtgatatttttaattcagcagggtgagaatgtttagtgaagcattatacgttcaaaaatttgaaataatctacaggttcattaacagataaattggagttactttaataggtggatatatgtaagtgggattaatattgtatgtgaatggagattaacagattataaacatatgtagcaaggtagataaatcttataactttgcatcctctgacccctcccaaaagaaaagcagacacaaaagaatatgtactgtgtgatatgatttgcataaagtttaaacatgagaaaatttaaatgatagtgtttaggaatgcgtattttaaggaaataattatcataaaagtcaaaatattagttacctttaaaaaacagagtgggactgggcacggtggatggctcacgcctataatcccagcactttgggaggctgagatgggcagattgcttgagctcaggagttccagaccagcctgggcaacatggtgaaaccccatctctactaaaaatacaaaacttagccgggcttggtggcacatgtctgtaatcccagctacttgggaggctgaggcacaagaatagcttgaaacccggaggtggagactgcagtgagttgagattgcaccacagcattccagcctgggcgacaaagcgagatccatctcaaaaaaataaaaaattaaaataaaaaaattaaagaagaaagacagagacagagacagaaagtgattgggcaaatgagggacttccagggtgctgatatgtttaaattcttgacctgggtagtatttgcaaaagtatgtgctttataataattcatggagttttacatttatatttaatgtatttttctccatatgtgcatattgcattatgaaaagaatttaaaaattatttgcttataatttatttaaaattttcacatcactattcaggagtgaagatgtctatagttttctcctgtttttattctttttttgaggtttgatatgttgattatataaaaagaacttgaagatttccattatttgtcttggctcagaaaatgttaaaaaatcactgtataattacccattctttaaagatttaataaaagttccctgtgccttcatctgagcttgttgtttttcttgttcattgaagagatagagattgtaaaatttggcccatttaggtttttgcaatactatgggtcacatttgataaattatgttttcttagaaaattgtctattttatctaggttttgtatatttgcatcaaaataaataaagtaatgctgtacgatcttttaatttcctctatttttatagtcccccctgagcccccatatcatttactggttgtgaatttgtaccttctcctgttcctccttgattaatgaaactaacagttttgggatttttttttaagaaccaacattagcctttctttataaatttatctgatgattcgtctaattcaatccttctcaaactttgatctctatacaaatcacctggagaccttgttaaaatactgattctgatttagtaggtctgagttggggcctgagattctgcatttgtagcatgttgccagtgatcccaacattgctggcccctactttgagtaataaggttctagcacatctatttattcttttatatgtttctatctatattaatctctttcttcacttatttttctaatttcctgaaagatatttaatacatttctttccactttatttttcattactaataagttttttatttatagttgacataataattgtatatatttatagagtgcagtgttatgttttaatgattgtataccttgtataatgatcaaatcaggttaattaccgtatttgttactttaaacatttatctctctttgtggaaatatcatacaaaatcttctctttttgctgtcttgaaatgtacacaacattgttatttattacagttgcctagctgtgttataggacaccagaactattcttcttgtctaactataactttgtacccactgaccaacctctccccgtcgtgctatcccctacacctaccttccccagcctctgataacctctactctctatttctatgaggtcaacttttttagagtacacaaatgagtgagatcatgcagtgtttgtccttctgtgcctggcttacttcacttaacataatgtcctctaggtttatgctgccacaaatgatagaatttcgttctgttttatgactaagtagcattccattgtaaactattccattctatacaccacattttctttatccattcatctatggataggcatttagattgattctatatctttgctattgtgaatagcactgcaataaaaacaggagggtagctatctctttgacacaaatgatttcatttcctttggatatatataataatggcattgctgtatcatatgatagttctatttttaattgtttgagaaacttctgcatccttttccataatggctatattaatttacattattaccaacaagtcataagagttctcctttctccacattctctccagcatttgttattttttatctttttgataacagccgttctgactagggtgaggtaatagctcatagtagttttgatttgcatttccctgattattagtgatattgaccattttttgtcatatacctgttgactatttgtatgtattcttttgagaaacatctcttcaagtctgttgcccattattaatcacattgtttgttattttgttattgcattgagttccttacatattctgcatattaaccccttgttagatgcatagttcacacatactttctcctattctgtaggttgttttttcactctgatttttttcctgtgctgtacagaagctctttagtttgatgtaatcccatttgtctatttttgcttttgttgtctgtgctgtagaaatactcgacaaaatactaagaaaccaatctcatcaacacattaaaaagatgattcaccatgatcaactgattcatcccagggatgcaaggatggttcaatatatggaagttagtaaatgtgatacatcacattaacataaccaagaataaaaactctatgatcattttaatagatgctgaaaaagcattcaataaaattcaacgtcctttaacgacaaaaactcttaacaaattgcatatcaaaggaacatgcttgaacacagtaaaggccacataggacaaattcatagctaacatcatactgaacagggaaaaattgaaatcttttcctctaagacttgaaacaagacaagaatgcccacttttaccacttacattaaacacagtactggaagttctaggcagagccattaggcaagagagagaaataatggacatccaaatctgaaaggaggaagccaaattgtccctggttgcagatgacatggtcatatttatagaaaactccaaagattgcaccaaaaaactgttagaactaataaataaatttagtaaatttacagaatacaaatcaacatataaaaattagtagtatttctataaaccaatagcaaactctctgaaaaagaaatcaagaaagcaatttcatttgcaatagctaaagaaaaaaacctaggaataaacttaactgaggaggtgaaagatccctatagtaaaaactataaaacatggatgaaagaaattgaataagacacaaaaaaaatggaaaggtaacatgtgattatggattggaagaattaatatttttaaaatgttcgtattacctaaagctagctgcagattcaatgcaatccctacgaaaataccaaagacattctttacagaaatggaaaaaaaaatcttaaattcatattgaaatgcagaagactctgaatactcaaagcaatctggagcaaaaaaataaataaataaagcaacaggtatcacactacctgattttaaaatacactacaaggctatagtaatcaaaacagcatggtactggcataaaaacagacatatagaataatgaaacagaatagagaacccagaaataaatctatgcatttacaaccaattgattttcacaaagatgccaataacatacattgggggaaagagcagcctcttcaataaatggtgctgggaaaagtgattatattcagaagaatgaaactagactcctacctctcacgatatgcaaaaatcaactcaaattaagactgtaatgtaagactgggcatggtagctcatgcctgtaattccagcattttgggaggccaaggcgggcagatcacctgagatcaagaattcgagaccagcctggccaacatggcaaaaccccgtctctactgaaaatacaaaaattatctgggtgtggtggcaggtgcctgtaatcccagctacttgggaggctgaggcatgataatcagaggcatgataatcacttgaatctgggaaactgaggttgcagtaagccaagcttaccccattgcactccagcctgggggatagagtgagactctgtctccaaaaaaagactgtaatgtaagacccaaaactatgaaactactagaagaaaacataagggatatgcttcacaaaattggactgagcaaggatctttttaataagacctaagaaggacagacagcataactattttatttattaataatttattaattaagattaattttaaaaattaacatgaaattaatgatttattaatatacatgtttctatgaatttccataagtcctgctttaatagtatgtagtaggttttgacctacatactgtggtatttttatgatttctttctctagatattttgatatttcaatatttgtaccctgtctgagctaagagttgtcataacagaaaactttttaacatttaggtgctattgaccattgttttctgaattttgttaatttctcattttttgcattgatgatactgtttctacttcttaaaatttgttgaagttttctttgaggcctagtgggtggttaatttctatgactgttacacataaaggtgtatacttcattatcaaggtatattttgaggcatatcaattagactatatctatgtcatttagcactatatattttgctacttagtacttctacaccttgactaatttttcctactggatgtgtcaaaaacagaaagaagaaaattaaagcctctttaaatgggggaaagaataggtttttcaacaaatgctacctggacaactgcatatccatatgaaaagaagggaatggaaccacctttccactccatacacaaaaattaactcataatgaatcaaagagctaaatgtaagaaatagcactatgaaattctcaaaagaaaatgtaggtataaatctttatgaccttgattaggtatggattcttagatgtgataccaaaaacacaagcaacataagaaaaaatagagaaagtggaaataatcaaaattaaaaacgtttttccttcaaaggataccatcaagaaaataaaaaaataacccaaggatttggagaaaattttaacaagtcatatatgtgataagggacttgtatttaaaataatatgtaatgaaaaaggggggcacattccaagatggccaaataggaacagcttcggtctgcatctcccagcgtgatcaacacagaagacaggtgatttctgcatttccaactgaggtacctggttcatctcactaggactgcttggacagagggtgcagcccagagagggcgagctgaagcagagcgggcatcgcctcaccagggaagcatgaggggtcgggggatttccctttcctagccaagggaagccgtgacagactacctggaaaaatggggcactcccacccaaatactgtgcttttcccaaggtcttagcaactggcagacaaggtgattctctcctgtgcctggctcgatgggtcccacacccatagagccttgctcactgctagcacagcagtctgagatcaatctgcaaggctgcagcgtggctgggggaggggcatccaacattgctgaggcttaagtaggtaaacaaagcagcctggaagctcaaactgggtggggcccaccacagcttgacaagacctactgcctctagactccacctctgtgggcagggcatagctgaataaaaggcagtagacaacttctgcagacttaaatgtccctgtctgacagctctgaagagagcagttgttctcccagcattgcatttgagctcgagaatggacagactgcctcctcaagtgggtccctgacccccttgtagcctaactgggagacacctcccagtaggggccaacagacacctcatataggtggctgcccttctgggacaaagcttccagaggaaggatcaggcagcaatatttgctgttctgcaatatttgctattctgcagcctacattggagatacccaggcaaacagggtctggagtggaactccagcaaactccaacagacctgcagctgagagacctgaccgttagaaggaaaactaatgagcagaaaggaatagcatcaacatcaacaaaaaggacatccacaccaaaaccccatccataggtaaccaacatcaaagaacaaaggtagataaaaccacaaagatggggagaaaccagagcagaaaagctgaaaattctgaaaatcagagcacctcttctcctccaaaggatcacagctcctcgccagcaatggaacaaagctggatggagaatgactttgatgagttgacagaagtagtcttcagaaggtcggtaataacaaacttctctgagctaaaggagtatgttcaaacccatcgcaaggaagctaaaaaccctgaaaaaagattagatgaatggctaactagaataaacagtaaagagaagaccttaaatgacctgatggagctgaaaaccatggcatgagaacttcgtgaagcatgcacaagcttcaatagctgaatcaatcaagtggaagaaagggtatcagtaactgaagatcaaattaatgaaataaagcaagaagacaaggttagagcaaaaagagtaaaaagaaatgaatgaaacctccaagaaatatgggactatgtgaaaagaccaaatctacatctgattggtgtacctgaaagtgatgggcggatgaagccaagttggaaaacactcttcaggatattatccaggagaacttccctaacctagcaaggcaggccaacattcaaattcgggaaatacagagaacaccacaaagatattccttaagaagagcaaccccaagacacataattgtcagattcaacaaggttgaaatgaaggaaaaagtataagggcagccagaaagaaaggtcgggttacccacaaagggaagcccatcagactaacagcagatctctcagcggaaagcctaaaagccagaagagagtgggggccaatattcaacattcttaaagagaagaaatttcaacccagatttcatatccagccaaacaaagcttcatacgtgaaggagaaataaaatcctttacaggcaagcaaatgctgagagattttgtcaccaccaggcctgctttacaagagctcctgaaggaggcactaaacatggaaaggaacaaccagtaccagccactgcaaaaatatgccaaattgtaaagaccatcgatgctaggaagaaactgcatcaattaacaggcaaaataaccagcaaacatcataatgacaggatcaaattcacacataacaataataactttaaatgtaaatgggctaaataccccaattaaaagacacagactggcaaattggataaagagtcaagacccatcagtgtgctgtattcaggagacccatctcacatgcaaagactcacatagactcaaaataaagggatggaggaagatctaccaagcaaatagaaagaaaaagaaaaagcaggggttgcaatcctagtctctgataaaacagactttaaaccaacaaagatcaaaggagacaaagaacaccattacataatggtaaagggatcaattcaaccagaagagctaactatcctaaatatatacgcacccaatacaagagcacccaggttcataaaacaagtccttagagatctacaaagagacttagactcccacacaataataatgggagattttaacaccccactgtcaatattagacagatcaacaagacaagttaacaaggatatccaggacctgaactcagctctgcaccaagcagacctaatagacagctgcagaactctccaccccaaatcaacaggatatacattcttctcagcaccacgtcgcacttattccaaaattgaccacatagttggaagtaaagcactcctcagcaaatgtaaaagaacagaaatcacaacaaactgtctctcagaccacactgcaatcaaattagaactcaggattaagaaactcactcaaaaccacacaactacatggaaactgaacaacctgctcctgaatgactactgggtaaataatgaaatgaaggcagaaataaagatgttctttcaaatcaatgagaacaaagacacaacgtgtcagaatctctgggacacatttaaagcagtgtgtagagggaaatttatagcactaactgcccacaagagaaagcaggaaagatctaaaattgacaccctaacatcaaaattagaagaactacagaagcaagagcaaacaaattaaaatgctagcagaaggcaagaaataactaagatcagagcagcactgaaagagatagagacacaaaaaacccttcaaaaaattaatgaattcaggagctggttttttgaaaagattaacaaaattgatagactgctagcaagactaataaagaagaaaaaagagaagaagactcaaatagatgcaataaaaaatgacaaagtggatatcaccatcgatcccacagaaatacaaactaccatcagagaatactataaacacctctacaaaaataaactggaaagtctagaagaaatggataaattcctggacacacacaccctcccaagactaaactaggaagaagttgaatctctgaatagaccaataacaggctctgaaattgaggcaataattaatagcctaccaaagaaaaaaattccaggaccagaaggattcacagccaaattctattagaggtacaaagaggagctgttaccattccttctgaaagtattctaatcaatagaaaaagagggaatcctccctaactcattttatgaggccaacatcatcctgataccaaaggctggcagagacacaacagaaaaagagaattttagatgaatattcccaatgaacatcaatgcaaatatcctcaataaaatactggcaaaccaaatacaacagcacatcaaaaagcttatgcactacgatcaagtcagcttcatccctagcatgcaaggctgtttcaacatacacaaatcaataaatgtaatccatcacataaacagaaccaatgacagaaaccacatgattatctcaacagatgcagaaaaggccttcggcaaaattcaacagctttcttgctaaaaacacgcaataaactaggtattgatggaacgtatctcaaaataataagaactatttatgacaaacccacacccaatatcatagtgaatgagcaaaaactggaagcattcgctttgaaaaccagcacaagaaaacgatgccctctcacaccactcctgtgcaacatattgttggaagttatggccaaggcaatcaggcaagagaaagaaagaaagggtattcaattaggaaaagaggaagtcaaattgtccctttttgaagatgacatgattgtatatttagaaaaccccatcatgtcagcccaaatctccttaagctgataagcaacttcagcaaaatctcaggatacaaaatcaagtgcaaaaattacaagcattcctatacactaacagacaaacagagagccaaatcatgagtgaactcccattcacaattgctacaaagagaataaaatacctagaaatccaacttacaagggatgtgaaggacctcctcaaggagaactacaaaccactgtacaacgaaagaaaagaggacacaaacaaatggaagaatattccatgctcatggataggaagaatcaatatcatgaaaatggccacactgcccagggtaatttatagattcaaggccatccccttaagctaccaatgaccttctttgcagaattggaaaactactttaaagttcatatgaagcaaaaaagagcccgcattgccaagtaaatcctaagcaaaaagaacaaagctggaggcatcatgctacctgacttcaaactatactacaaggctacagtaaccaaaacagcatgatactggtaccaaaacagatatatagaccaatggaacagaacagaggcctcagaaataacaccacacatctacaatcatctgatctttgacaaacctgacaaaaacaagaaatggggaaagaattccctatttaataaatggtgttgggaaaactggctagccatatgtagaaagctgaaattggatcccttccttataccttatacaaaaattaattcaagatggattaaagacttaaatgttagacctaaaaccataaaaaccctagaagaaaacctaggcgatacctttcaggacataggcatgggcaaggacttcatgactaaaacaccaaaagtgatggtaacaaaagccaaaagccaaaatagacaaatgggatctaattaaactaaagagcttccgcacagcaaaagaaactatcatcagagtgagcagacaacctaaagagtgggagaaaatttttgcaatctacacatttgacaaagggctaatttccagaatctacaaagaacttaaacaaatttacaagaagaaaacaaacaaccccatcaaaaagtgtgcaaagatatgaacagacacttctcaaaagaagacatctatgcagccaacagacacatgaaaaaatgctcatcatcactggttattagagaaatgcaaatcaaaaccaccatgagataccatctcaccccagttagaatggcaatcattaaaaagtcaggaaacaatagatgctagaggatgtggagaaataggaacacttttacactgttggtgggagtgtaaattagttcaaccattgtggaagacagtgtggtgattcctcaaggatctagaactagaattaccatttgacccagcaatcccattactgggtatatacccaaaggattataaatcatgctactataaagacacatgcacacgtatgtttattgtggcactattcacaatatcaatgacttggaaccaatccaaatgtccatcagtgatagactagattaagaaaatgtggcacatatacaccatggaatactctgcagccataaaaaaataaaggatgagttcatgtcctttgtagggacatggatgtgactggaaaccatcattctgagcaaactatcccaaggacagaaatccaaacaccacatgttctcactcataggtgggaattgaacaatgagatcagttggacacagggcaagggaacatcacacactggggcctgttgtggagtgggggactgggggagggatagcattaggagaaatatctaatgtaaatgatgagttgatgggtgcagcaaaccaacatggcatgtgtatacctatgtatcaaacctgcaccttgtgcacatgtaccctagaacttaaagtataataataaaagcaaataaacaaataaacaaaatcaataataagaaaatttttaaaaagtagctattacaattcaataatacaaagacaaataactcaattttaaaatgagcaaaggatttcaaccaacatttctccaaagaagatataaaatgttagccaaacacacgagaagattttcagcgtcattcatcattagggaaatgcaaatccaaatcacagtgagatatcatttgacaccagttaggttggctatattcaaaaagacaaaaaataacaagtgttggcaaggatgtgggaaaattggaaccctcatacgttgctggtcagaatgcaaaatgttgcaacctctttgaaaagcagcctggctgtttctcaaacgattaagaatagagttaccatgtggtccaacaattctaccacttgatatctacccaagagaaatgaaaacatgtccacacaaaagcttttgtatgaatgttcatagcagcaccagacacaacagcccaacagtggaaaaaacccaaatgtccataaattgatgaatagattaataaaatgtagtaacccatataatggaatattcatcagcaataaaaataaatgaagtacttgatgcttttgcctcacaactcttaagattctttcctttgtcctgactttagataatctgatgactatgtgcctaggtgatgatctttttgcgaagaacttcccagtgttcttagagcttgttgtatgtggacgtctagatctctagtaaagccaaggaagttttcttcgattagtccctcaaatatgttttccaaacttttagatttctcttcttccttagaaacaccaattattcttaggtttggatgtttaatatagtcccaaacttcttggaagcctttttcattaaaaaaatttttttttctttgtctttgacagattgggttaatttgaaagctttgtcatcaagctctgagattctttcttctgcttctttgattctattgctgagactttcctgtgcattttgcatttctttaagtgtgcccttgatttccagaagttgtgactggtttttatttatgctatctacttcactgaaaatttttcctttcatatcctgtatcacgtttttgattctgtcactatcttctgtgtccttgccaatattttaattaaattattcactctatggtcagttatcttcactttgttttctctgtgaagttatatttttgtgctcttattagagcatttatatttttattatattagttatctttatagttataaattgatcttagtcctctggtgtttgtttattcttactagttataactgtgaatattattatatttcttccttttctctccttttatctctggatccagcagcatactgattttagtcaataatttcttttctggtgtttgctttgatataactgtgtttctgatttatgacttgatttgccaactttaaatgaaatcctttgacttccagctgttttaaattaaacagtaaacacattttctcatcatttcaatttctttccctcttctcctctcaatgtttcagttatgttttatctgccactctaactcacatttttctagttttagtggtactgttaaatatatagtctccctcaatcttttccccaaacttattgattgactgaattttctcttttattggttcccacaaaaagacatcaacaaaataatattgctccagtttttgaactcttattaaaactattgtttgtagcccttatacttcaagaagagtttgcatatatattcttatctcaaagtctctttgcttgagaatctcatgggattgtatctggtattcagagttgctgtgtaaaaacaggaaggcagcctgaattcttctttcttgtaaaattgacctagtcttttcacctgtctgccgaaaggattctttatctttgaagcccagcaactttattgggatatgtctcattggtcattctgggtctttctttatttcttctattctatcacaccaactttgccattctcaacctctgtgaatctcctgtgatttttatactatctgattcttttgccccattttgtttttatttccttaattcttctattttttttttcttggactacacctttccttagttgtgcaagctcatatcttatctcttcctgctatgctaccatactttccctgaattattccattactgtgttatatatcatctttcatccaggtgatcactttaatttgaaggattttttttcctccaaattcatggcaagacatttgttcataactttcattggtatggtaatattttacagaaggatatactttattaatacattttttgccttttttcccttttgtcttggagtatagatataatttttattattcatctttgaatggttttcattttcctaagctctgtatttataagggctttcttgaggcaggaccaggtcagctttcctgtctagcatgcttgcccagtgcaaaggttcttcttttccacagtctccacaaaggtagaacgcttctcaaaaaaatgtgccttgtctttccaaatctttatttggccttgcttcttcttttttatgaaattcattatagtcccattagggtagaaggtcacatcctgcttctgccacacctttgccagcaaggggtacagcttctgactctcaagacatacccatcacttgcgggaaggaaattgttagtagtgtgttctgagatctgtcatggctggtctcctacaactgaggtcttgagatctgtctttagcctttcccaaattcttcccagaagaattcagttgcttttagaaaatcttaaaagtattttaagatttaggataaatacttaaaagtatttaaactctctcctgaagtttatttaacaactgagtttttgttctgagttttccattctttatttgccttagggtggttccagggagagaagtttggagaaggctgcatgacgcagccatgagtatacactgggagtttccactccatccccaatctccaccaaaaagacggtgcttctgaaggtatttttttccttctaatgccttagtttctttatacagtggccaaaaatagtacaagaatatcttcatggcaactacaggcattgctcattgtatggcaagctgatttatggaacttttccactacagaattgatggttctgagcatgaactcaaacagcagttacctgaaaatccagacacatgaggtcttatcccccaatctgtcagttctgtcagggtgaaatgtgcgccttctcagccttctgtcttctttggtgctcattgctaaatagttcagtagaaatgcctcagaggaatcatcttggtgctggctccaaggctctgtgcagtcagccaggctatgaaagaaggcagcctgtgccttctccagactcattcctgctccatcctcaacctaatcttcctgaatacactctccattcaagagccgatggaaaaatggatcactgacaaataacgaattattgtatgaattaacctcttgctggcaactgggcagtttgatagcagactcaaactgggtgatttgagaatttaataaagggactactaattcatcctatgctaatatgaaccctcatttagggttgagagagagtagccaagggatagtgcagtagttggggatttattaatggcagagagcctttaccatttcttgacctggaggggctaaatggcacaggaaacacccaagagtattgcatagctagggcttctggaaaggagcttcagccttcagtagtgggctataggctgtagaaggagggaagtagggaaaagaatctcaccctctctgtgtcaccttctcagctcctgccagtgcttctcattggccaaaccaaatcaacagccagatagcaaatggagttacttgattaagtcctcctatgatggggggaagacagtggatatggaggggcagaaagaaaataaacaaccctacagggatccaccaattgcttttattcagaataaaattttattcagaataaaatttcaaagctattttattctgtaccaaacattgcaaatgttggcttgcggaaagcaaatacaagattattctaaagaaaacattaagcctgaggccatatatcaattacaaggtgaattttagggctcaacacagttatatatcatcaagttcaaatgaacaaatgcctggatttgaatgctaaggcataggattatttcaatatgcacactctgagcattttctgaaaatcatcaagcttttattaccattttatcctaaatcccctgaccacttctcattcaatttgcatgaacaggcctcctctttccacccttattttaatcctggagtttcctaactcagccttctcctctgctaattctactccttctcatagacaggtaactttttctattctttgacatcagtttccacatcttctctagtgagatttcatactatttctttagctcagccctcccttatgaattctcagcccacagaacatagctgccaactggacattttcacctggatgctttatagacatcttaaatcatgttgaaaaactaactcattatcttaagcattcccaaacaaccttctaactcacgcgtgtgcgcacacacacacacacacacacacacagacaccctgcctattcctgaattctcaaacttttaaaatatttcatggccttcatttttgttttctaacaaaaatagataaatgtatgaatggaatgtttttttggcagagaaataagtaaatatttttaaaatttcttcagtgttttctacaatgaaaaggaaatcaacaatttctatactctacgtaggggtcagcttcccaaacccatgacccattagtaatcatcaacaccttatccctggtctcccatatcccggtggttataaattcatggttaaggcacatagctcatgtcttccctgcttggaactgtatgcccatgtctggcattaaaacagctatttcttgaatgagtaactctatgtcttttagctctatgctctaactatctccactgccagccctgcttcatctgattttagtcaataatttcttttctggtgtttgctttgaggacctatgtcaagatctgctgccaccaccttcacataggttctcagtgtcttcctcctatagcaccaaagggccttccagaggccttcctgcctccaaatattccctctctaatcctttctcttcactgcagccaattacctttctaaagggcaattgtggtccctctttaatttaattttattttatttgagaccggttctggctctgtcacccagtttggagttcgatggtgcaatctcagctcactgcaacctctgcctcccaggctcaagctgtcctgccacctcagcctcccaggtaactgggactataggtgcatgccaccatgcccagctaatttttctatttctttgtagagatgaattttcaccatgttgccaggctggtctcaaactcctgagctcaagttatctgcccacctcggccttccaaagtgctggtattacaggcatgagccactgagcccataaataataataagaaaactcactacttctgccttgctggctgggccacagacgattcctgtgtatttcccaaaacagtatgcacacacttgcatttgcaggttagagacaaagtatgtccactctaggttcttgctgcccttgagctaccttccagtttgctacctcctatctacaggactaagacccaagttcttagcatggaaatcagttttccttttcagcctcatttcctgccttacccatccactcacttagaacttggattcttcaacctcttacagtcccctaaaatgttttctgtgtgccatgccccttttgccttccccaggagttcctatttatgcttcaagaagcatctcaaatatcactccctccatgatgcctttgcgaactctctagcattagctgctccttcctctgatgttgtcctattttgtctatctctgtgttgtgcaataattacatctttacatttctgttggcccagcacaagccctacaggccagggctgtattgtagttttctttgtcatcctacccatcagtgccaaatttggaaaatagcaagaactcaatcaatagatgctaaactaatgaacactttattagcctacatttatggagcattcttggtacccattaaacagtttcatctctctcatatgtcagtgttatgtttcactgcagctttccctaaggaattttgtgagaaatatggagtattgcagcactattctttggtcacatgggggtttaattcctatttatacttttcttgtattactagaaataatgactgtaactacttatctggcaaatctctgaaatttctttttaaggaaattgttattgttggagaaatttgcaaagcccgactctgccagggctctattcctcatatctaagcagttaattctctactacgttacgtttagctttcggctctggaaacactctttgaatgcctcctttgtgcagatttatccaactctctcctctttctttcattaagcttgccctgtaaagccatattccttctgttttcaattgtgaatttatttcctctggagctttctgacttagaatctatttgaacttctatagaaactttggttgaaaaggaaaaaaagaaaaaaaagggcctatttttaaaggttttctctttcacctaatattagaggggatttctttgtgattaaacaaatttgttataaagtaacacacactgtgaaatatccaaacaactacaatgtcattataaatatatttttcttatcagagaaggcaacaggcaaatcagccactcttgcaaggtcatatttcacagagacagctgaattcacccactgttgaattatgttataaagccagtgatttagtattgtcatctattttgattgacaccaaaagccttccaggacagtaaatgtaaagatgttagaagaaaatcacttacaaaatggcttgatagttcatgttaatgagttttaaaatgcggtataacaacttaatcaaatcagacagctccataaaagaattaatttggtcattggctctctttccaaaatgactttgttgtactgagtaaggtgagaatttttctgtggctgaaacattcacaactagattcgaaatgacatagcctgggataagttatggattaaccaaagtttctcaggagttatttatatttggcctcttgttaaatgagatgcatgtcttttctgaagtttcattttaatgaaagagaaagaagaatatgaatgacatgtattaaagaccccgagcccacacttaaaacctcaattttggataacttgtgtgttaccttttagaaattagagtgtcattgggttgctattatgggtcgccaacagaaggggattcaggaatatctccatactgccccagaccacagcaataattttctgcaatgtcaagagaaaaacacaggacaataaccagttgaaagcagcaaagttctgcattattttttgctgtcctcttgtcccaaactctagaggagattattagaaacgtagtatctgcccctgtagaattatgggcttatgacaagactagagacctaaggagactagtttcttgtctatccgggctcaaacaccaacctctttcatgcacttccagactgaagttgtttctaaggtcagctttaaggagaaaattacatataatcagaattaccctccagaattcataaatcaccttccattggtatagatcactgtctcttggattgagcagcagattaagtagtcagattgcatttaggtttacattatataaaatttaatatgttttggctgggcgcagtggctcacacctgtaatcccagcactttaggaagccaaggtgggaggatggatagaggtcaggagttcaagaccagcttgggcaacatagcaagacctcatctctataaaaactttaagaattagctggacacagtggcacatgcctgtagtcccagatacttgggaggctggggcagaaggatcatttgagcccaggagtttgaggctgcagtgagctatgatcatgacactgcactccagtctgggtgacagaatgagaccgtgtctctttaaatattaggaatcaccttcagaatggcattgaaaggcaggaagtctgccaggcagtgcgtgagggaagagcagagtcatagactctcctcagactatcttattgacggacaagttacaggtacttttaaaatcagtctctccttcctctctctctctccttttctcagctttctgtctctctcctagagttaaattttaatgaaaaaaaataatgtgaattatttgtgtgttatatatgtgtaacatttctatgtatttatattattaatatgacataataatataatatttgtattattaatatttatttaaaaccatcagcacacacttagaacctccgttttgggtaatgtagttattaccaacattcctacctgacatttatttgtgtatttgttcagtgtatatctgtgtcttctgtgagactgtggggtttatgaagaaagggactatgtatcttttggctcaccatttcattcccacgactagcatggagccgaagaggagatgaaaacatttttatcaaatgaatggctaaaggagagagaccattagacattactacctttggaagttctcttagtaactgtggctcaatcatgttgcagtgttatagacacctttataatttacaaagaactttcacaaacatggcctcattataaaggtgacaagcatgattgtcccccataccagtctgtagaagaagaaactgagacttggagaggctaaccaacttgtgcaaagttgcacagctaacttatgacagaactaggtcttgaacccctgtcttctaacccttagccagaccagttggagttccccatccccagtgacctctcctacatttatggggactcttgtgtatcagagtttgtgactctgtgcccgtgtaaggcagtgatcacatcttgtccctcacaacagagatgtattaagtgcctactatgcgccagacatgcaaaaaacttccaggacgcaaacaagaatgagatgtatgtatttcttgccatcaaaacaactcacaatctaatgcagcatagtgttaaacatgtacatttctaatatactgttgaatatgtttgtggatgaaatcctatcctgcttgcagttgcaataatctgcaggttaaatggaaggaaaagcaaggcttgctggtttgcacaaacgttaacaactattagctcaagttcgaaacaagattgtaaccattctgcacaagtgttaaggagtgcatatttgcagagctgaggccaggaggcttaaattttagaaacagctgtggaactcctttcagtatgtacagttggaaggaggctggcattgtcagggagtcgctctggaaaatacaggcactgaatatattttatcttttcccttattccagtgttagtgtccccatagaattccaagtgagaaaataacctgcaaaggtgtgaggtgggaatcatattacaacattcaagcaggtgagatcctcagagatgaaaggggaagaaaatggcactttaatgcatgagagtaatcttccaggatttgtaccaggatgtgttatattttaacaagaagagttctcagaagggtcagtttcaggaacatcacatgaacccctggagaaaagtaaatggttgattggctgtcacacttactgtttcaatatgctgggtaaagcaaagcgaggaaaggtgaggtctcaccaagtgcagattacaaaacaaatgcattctttgtgtgcttttttcatagtagatgattttgaaacaaaaagagaaaaataaacctgttgagtagaaacttgggaagtaaaactgagtgatagaggattagttttcacatgtaggcggtacacagagtttgtacagtttcgtagttacaagacagggtagaatgaatatttaaagagaagactgttaggaacaatggttcagaaggatgaaggaactcaataaggttgtgagggattgagaaggaatgttttgcttgaaacatggagtatggcaacaatgaatgagcctagttttgaatcaaaatgacctgaaaaacttctgtagaaagtttccaacaaagcagtgctgtattatggaagatcctgccatatggattgaaacttttctagaacttttaatagacgagccctcataagtaagatccaggcaaccaaattactactctttgaatgctattgtgggtatcatgtcaagatccaatgttttctttccatgttatactaaagaaataaaacttaatgtctatagttcaggttatatttgaaactttaatagttctagattgaagctagcataaaaacactgtatactgagcatggtggctcacacctgtaatctcaatgctttgagaggccaaggccagaggatcacttgaggccaggagttcaagaccaacctgagcaacatagcgagaccccatctgatatggtttggctctgtgttcccacccaaatctcacctcaaattgtaataattcccatgtgttaagagcgagaccaggtggagataattgaatcatggtggcagtttcctctatgctgttctcatgatagtgacttctcatgagatctgatggttttataaggggcttcccccttttctcagcactcatcctccctcctgctgccctgcgaagaggtgctttctgccatgattgtcagtttcctgaggccttcacagctatgcggaactacgagtcaattaaacctcttttctttataaattacccagtcttgggtatttcttcatagcagcatgaaaacagactaatacagtaaattggtaccaggagtagtggatcactgctgaaaacatacccaaaaaatgaaaataaaaaattagccagacatgatggcatgctcctgaggtctagctattcaggaggctaaggcaggaggatcgcttgagcccagaagtttgaggttacagtgagctatgattgtgccactgcactgtagcctgggtgacagggtgagactttgtctctaaaaaagtgaaattaaaaaaaagaaagactccataaatgacattttaaagggaaaaaatgtttatgacaattatattgtatattcaaacaaaatgtattcttatttcataaccaatgaaaatctgtgttgactggaaaagagattaattatggtcactgagaagcagaatgtaaagcattatttgcaggaaaagaaagcctagtttcctttacatgccactcacatattggtattttctcattattagaacttacatttttttaagttcagagttttaaaattccccagagacttctgcaaaacctgaaccatcattgagtaatccatcaaaaatccagaggcattaaaagttccatgactaatatgtgtgaaatgtttgaagatgaaactctcttttgtaattatagaccgcagaatgtggaatagtttctgccgtttgaattacctacctgaggatactacttgaaagttccatcttccgtaaataacagccagcctgttatagaagacaggcagtgttttcatacctggaatagaaattattttagaatcatttccatgcaacattttttcattattactaagatctggtgactatgaaagggagtaaacttacacagctggctcttttcagacagagagattcaatttattcttgttccaatactgtaggaaaataaaaaggttaaaattaccttttggattcaatgtgatattttccctagatacctaaacaaatggaagacaggcagctttcccagctttggaataggggacagtaagggatttcccttgtagcgtgttgtgttttatctgaaatctggcccttttctgtaattaaaaaagggatttaggtactgaatttaatcctttaaatggccaatatcttgtaacttttccagatatttccctggttcatcaagaggcaagagacttactttaattctgatctaatatgtacctgccttttaattatgtgctaaaacaatttgggagatgggatggtttggtacaaacttgctcctgctgtggaaatggtgacttggttgatctaggttctggtccagaaatgtgcaggtttgggtttgttttttttttttcaattattatactttaagttttagggtacatgtgcacattgtgcaggttagttacatatgtatacatgtgccatgctggtgcgctgcacccactaactcatcatctagcattaggtatatctcccaatgctatccctcccccctgcccccaccccaccacagtccccagagtgtgatattccccttcctgtgtccatgtgatctcattgttcaattcccacctatgagtgagaatatgcagtgtttggttttttgttcttgcgatagtttactgagaatgatgatttccaatttcatccatgtccctacaaaggacatgaactcatcactttttatggctgcatagtattccatgctatatatgtgccacatttacttaatccagtctatcattgttggacatttgggttggttccaagtctttgctattgtgaataatgccgcaataaacatacgtgtgcatgtgtctttatagcagcatgatttatagtcctttgggtatatacccagtaatgggatggctgggtcaaatggtatttctagttctagatccctgaggaatcgccacactgacttccacaatggttgaactagtttacagtcccaccaacagtgtaaaagtgttcctatttctccacatcctctccagcacctgttgtttcctgactttttaatgattgccattctaactggtgtgagatggtatctcactgtggttttgatttgcatttctctgatggccagtgatgatgagcattttttcatgtgttttttggctgcataaatgtcttcttttgagaagtgtctgttcatgtcctttgcccacttttcgatggggttgtttatttttttcttgtaaatttgtttgagttcattgtagattctggatattagccctttgtcagatgagtaggttgcgaaaattttctcccattttgtaggttgcctgttcactctgatggtagtttcttttgctgtgcagaagctctttagtttaattagatcccatttgtcaattttgtcttttgttgccattgcttttggtgttttggacatgaagtccttgcccatgcctatgtcctgaatggtaatgcctaggttttcttctagggtttttatggttttaggtctaacgtttaagtccttaatccatcttgaattgatttttgtataaggtgtaaggaagggatccagtttcagctttgtacatatggctagccagttttcccagcaccatttattaaatagggaatcctttccccattgcttgtttttctcaggtttgtcaaagatcagatagttgtagatatgcggcgttatttctgagggctccgttttgttccattgatctatatctctgttttggtaccagtaccatgctgttttggttactgtagccttgtaatatagtttgaagtcaggtagcgtgatgcctccagctttgttcttttggcttaggattgccttggcgatgcgggctcttttttggttccatatgaactttaaagtagttttttccaattctgtgaagaaagtcattggtagcttgatggggatggcattgaatctgtacgttaccttggccagtatggtcatgttcacgatattgattcttcctacccatgagcatggaatgttcttccatttgtttgtatcctcttttatttccttgagcagtggtttgtagttctccttgaagaggtccttcacatcccttgtaagttggattcctaggtattttattctctttgaagcaattgtgaatgggagttcactcatgattttgctctctgtttgtctgttgttggtgtataagaatgcttgtgatttttgtacattgattttgtatcctgagactttgctgaagttgcttatcagcttaaggagattttgggctgagacaatggggttttctagatatacaatcatgtcgtctgcaaacagggacaatttgacttcctcttttcctaattgaataccctttatttccttctcctgcctaattgccctggccagaacttccaacactatgttgaataggagtggtgagagagggcatccctgtcttgtgccagttttcgaagggaatgcttccagtttttgcccattcagtatgatattggctgtgagtttgtcgtagatagctcttattttgaaatacctcccatcaatacctaatttattgagagtttttagcatgaagggttgttgaattttgtcaaaggctttttctgcatctattgagataatcatgtggtttttgtctttggctctgtttatatgctggattacatttatttatttgcgtatattgaaccagccttgcattccaggaatgaagcccacttgatcatggtggataagctttttgatgtgctgctggattcgttttgccagtattttattgaggatttttgcatcaatgttcatcaaggatattggtctaaaattctcttttttggttgtgtctctgcccggctttgctatcaggatgatgctggcctcataaaatgagttaggaaggattccctctttttctattgattggaatagtttcagaaggaatggtaccagttcctccttgtacctctggtagaattcggctgtgaatccatctggtcctggactctttttggttggtaaactattgattattgtcacaatttcagttcctgttattggtctattcagagattcaatttcttcctggtttagtcttgggagagtgtatgtgtcgaggaatttatccatttcttctagattttctagtttatttgcatagaggtgtttgtagtattctctgatggtagtttgtatttctgtgggatcagtggtggtatcccctttatcattttttattgtgtctatttgattcttctctctttttttctttattagtcttgatagcggtctgtaaattttgttgctcctttcaaaaaaccagctcctggattcattaattttttgaacggttttttgtgtctctatttccttcagttctgctctgattttagttatttcttgccttctgctagcttttgaatgtgtttgctcttgcttttctagttcttttaattgtgatgttagggtgtcaattttggatctttcctgctttctcttgtgggcatttagtgctacaaatttccctctacacactgctttgaatgcgtcccagagattctggtatgttgtgtctttgttctcattggtttcaaagaacatctttatttctgccttcatttcgttatgtacccagtagtcattcaggagcaggttgttcagtttccacgtagttgagtggttttgagtgagattcttaatcctgagttctagtttgattgcactgtggtctgagagatagtttgttataatttctgttcttttacatttgctgaggagagctttacttcccagtatgtggtcaattttggaataggtgtggtgtggtgctgaaaaaaatgtatattctgttgatttggggtggagagttctgtagatgtctattaggtccgcttggtgcagagctgagttcaattcctgggtatccttgttgactttctgtctcgttgatctgtctaatgttgacagtggggtgttaaagtctcccattattaatgtgtgggagtctaagtctctttgtaggtcactcaggacttgctttatgaatcttggtgctcctgtattgggtgcatatatatttaggatagttagctcttcttgttgaattgatccctttaccattatgtaatggccttctttgtctcttttgatctttgttggtttaaagtctgttttatcagagactaggattgcaacccctgcctttttttgttttcctttggcttggtagatcttcctccatccttttattttgagcctatgtgtgtctctgcacgtgagatgggtttcctgaatacagcacactgatggctcttgactctttatccaatttgccagtctgtgtcttttaattggagcatttagtccatttacatttaaagttaatattgttatgtgtgaatttgatcctgtcattatgatgttagctggttcttttgctcattagttgatgcagtttcttcctagtctcgatggtctttacattttggcatgattttgcagcggctggtactggttgttcctttccatgtttagcgcttccttcaggagctcttgtaaggcaggcctggtggtgacaaaatctctcagcatttgcttgtctgtaaaggattttatttctccttcacttatgaagcttagtttggctggatatgaaattctgggtggaaaattcttttctttaagaatgttgaatattggcccccactctcttctggcttgtagggtttctgccgagagatctgctgttagtctgatgggcttccctttgagggtaacccgacctttctctctggctgcccttaacattttttccttcatttcaactttggtgaatctgacaattatgtgtcttggagttgctcttctcgaggagtatctttgtggtgttctctgtatttcctgaatctgaacgttggcctgccttgctagattggggaagttctcctggataatatcctgcagagtgttttccaacttggttccattctccccatcactttcaagtacaccaatcagacgtagatttggtcttttcacatagtcccatatttcttggaggcttttctcatttctttttattcttttttctctaaacttcccttctcacttcatttcattcatttcatcttccatcgctgataccctttcttccagttgatcgcatcagctcctgaggcttctgcattcttcacgtagttctcgagccttggttttcagctccatcagctcctttaagcacttctctgtattggttattctagttatacattcttctaaattttttcaaagttttcaacttctttgcctttggtttgaatgtcctcccgtagctcagagtaatttgatcgtctgaagccttcttctctcagctcgtcaaagtcattctccatccagctttgttccattgctggtgaggaactgcgttcctttggaggaggagaggcgctctgtgttttagagtttccagtttttctgttctgttttttccccatctttgtggttttatctacttttggtctttgatgatggtgatgtacagatgggtttttggtgtggatgtcctttctgtttgttagttttccttctaacagacaggaccctcagctgcaggtctgttggaataccctgccgtgtgaggtgtcagtgtgcccctgctggaggggtgcctcccagttaggctgctcgggggtcaggggtcagggacccacttgaggaggcagtctgcccgttctcagatctccagctgcgtgctgggagaaccactgctctcttcaaagctgtcagacagggacatttaagtctgcagaggttactgctgtctttttgtttgtctgtgccctgcccccagaggtggagcctacagacgcaggcaggcctcctggagctgtggtgggctccacccagttcgagcttcctggctgctttgtttacctaatcaagcctgggcaatggcgggcgcccctcccccagcctcgctgccaccttgcagtttgatctcagactgctgtgctagcaatcagcgagactccgtggggtagtaccctccaagccaggtgcgggatataatctggtggtgcgccattttttaagctggtccgaaaagcgcaatattcaggtgggagtgacccgattttccaggtgcgtctgtcacccctttctttgactcagaaagggaactccctgacccttgcgcttcccaagtgaggcaatgcctcgccctgcttcggctcgcgcacggtgcgcacacccactgacctgcacccactgtctggcactccctagtgagatgaacccggtacctcagatggaaatgcagaaatcacccgtcttctgcgtcgctcacgctgggagctgtagaccggagctgttcctattcagccatcttggctcctcctctcaggtttgggttttttatgatggtaaaatatacatattataaaatgtatcactttaattgtttttaagtgtacaattcagtggcattaagtacactcacattgttgtgcaaccaataccactatccacatgcagaactttattctcatcccaaattgaaactccacactcattaaacagtagctgtccatttccctcttctctcagcccttggtaaccactattctagtttctgtctctgtgagtttaactattctgggtacctcatatacatgaaatcatacagcgtttgtccttttcgatctggattgtttcattgagcatgttttcaaggttcagcaatgttgtagtttgaatcagaatttcattccctttcaaggctaaatatgttctactccatgttatacacattttgtttatccattcctccattgatgggcatttgggttgtttccaacatttggcttttgagaagaaagatgctattgacattggtatacaaaatttctttgagcccatgctttcagttttttctatatatctctagaagtgaattgctggatgatatggtaactctatgtttaatttattgaggaattatcattctatagaaatgtgtagttttttttgttgttgttgttgttttatttgtttgttgagacagggtcttcttctgttgcccaggctaggcttcagtggcatgatcacagctcactgcagccttgacctcctaggcccaagcaatactaccactttagcctcccaagtagctgggactacaggtgcatgccactacacccggctaattttttttttttttttttttttttgagacagagtctcactctgtcacccaggtgtgatctcggctcactgcaacctctgctgcccaggttcaagtgattctcctgcctccgcctcctgagtagctgagattacaggcgccagccaccacgcctggctaatttttgtagttttttattttttagtagagacagggtttcaccatattgcccaggctggtctcaaactcctgagctcaagcagtttgcccacctcaacctccaaagtgctggaattacaggcatggaccaccatgccaggccagaatgtatagttcttaatcagcattccaggtgatgttatgatcagataatttgagaaacatttatttgtcagttacctattgctatgcaaccaaccactccaaacaattagtagcttacaacaacaaccatttatttagctcacaattatactgggtggctcttctggcctgggctgggtttgtctggtctctgttggcctagctcatgtttctgtggtcatttggctggtcttttgggtgctggctgttctcagatggcctcagtcatatatccagtggttgcttggctataggctgaagcaatggcgtgactaggcctagaacctttccttgtttagtaagctaaccccagcttgctcccagggtggcagggtcccaagaacagcaagagagcaagctccagtgcataagctcttttcaagtctttgcctatattatgtttgcttgtcctgttgggcagagcaagtcacctggccaagcccagtgtcagtatagagggcactaccaaatggtgtggacacagcgaggcagaaaaagagctgagaccattactattattattccaccacaacttaactgcttgattcagtattctgacgtgaactcagggttatctgaaaactttctcctgccgtaataaatctgtgaatggagcataatcatgtctgaagttgcatagagccctctgaaccacatgccccagcacctctgcaacgctctccatttgagggttcattcattaatttaataaatacttattgtgaatctactcatgtctggaactcttctaggacctgggtatacagctattgacaaaatagtccaagttcctcttctccagggacttacattctactgcaggtggaaaagttttaggagtgagaataaatgtttggatccctagcacatattcaggaggttttgtggttgtcattgtttaaagaggaagaagtttgaagaatgttctttattccctattcttcaccactatgtgcttttactaatatttgagtagagaaaaatattttggttaattagaatttccaggtatttaaatgccagaaggcagatgcaaacctgtgggaggatattaggattgacttttaacttgtaatccttatagcttggtgcagaagtaaccgtggcttgccgtaagggcaaaagccacaattacttttgcaccaacctaatacaagactgatggattcgcttctcacttcctttatgctttctgcaaggctttgtggctaagacttttggccccatagctacctgagggagggctactgatctttacagctcaaagggcactgaagagtcacatccagctgagcagtgatggatggctacaacagacattttctttggatacttctttattttattattattattatgtgtgtttaatcctatgggagtagaccagcattctatatttttaaagtagcactagtttgttggaaaatttgacttttataaactgaaagtgtatgtcatcagtacctggagatgagatgggtttaatgtccagctggtgctcagaggggctgggactctctgcatgggttagtttgccagctaaaactcacttcatgcacaagagctttcattgaacaacagtcaagctttgcttcagggtaagcaggtatttcagtgggggagaattaggagacagcatgtagtagtattcaaattaggatctttagagtcagacagatgtgtccgttactagcttggaccttgggcaaatgacttaacctctctgagtctcagtttctttatctataaaatgggataataacactatctgccccataaaactggcagcactaacagaaagcatgcaaagcttgtagcatagtgcctgcagtggacacttgattaaaaatgttagctaaaggctgttatcttttttttatttttttagatggagtctcactctgcctcctaggctggagtgcagtggctcaatctcggctcactgcagcctctgcctcctgggttcaagcaattctcctgccccagcctccggagtagctgggattacaggtgcccgccaccacacccggttaatttttgtattttgagtagagactgggtttcaccatgttggtcaggctggtcttgaactcctgacctcagatgatccacccgcctcagcctaccaaagtgctgggattacaggcgtgagccaccatccctggcctaaaggctgttatcttaataaatgctgttctgatctacagttacatcaccacaaactgatgcctttggcctggcccacagtgccagaatctgaactacaggggagttactctttgaaccaccctagcaccaatcctagctgagaaaaagacatttatgaaactgatttgccatttgtgtgtagccagtcaggaattcctacttgggctcttggccactatttgagcaacttttctgtaacactgaaccatagaagcagcccatccaccaccaccacaacaataaaaactagcacttcacacactagcaccttacctggaatgattttagaggtgttagagagccccagaatatctcctgtgtaactttccaccagactttatggacgagccaactaccaagctgtaaattgattgaatcttgtattttcctctttggacttagctgggcccagtgagagtttggttgagagtagattttggtggatgggaacaggagtttcatgaggtaagaggagaagagagagagaatttttgttcatgggtataggagccatgtaagttgtataatttcactataaacatggcacgcagggagagggtgaattgtgcccaggtaggcaggggaaattgcaaggctttggtgttggggagagcacagagataaagaaattacgggtaggagagggatccaaaggggaaatgaaggagagtgaaaggcaaacttttcagctgagttacatgagcgacatcaactataacacaaggtggaaaaatcccatcttcctgtcctcccccatgtgacaagaagctgatctgccttcttggatttatttccttctggggctgtatttctctccttgcgctttgtctcacctcctaccttgttataggcgatctttctccccctgaggaaatcataattctatcactgtggaaattgaagtgtcttcagctttcttaccagtcttagagtattttcttaggccaaattgccaatttcctcttttatggaaaatactaaaatacttttttttaatagagtgaccttgatcctttcccatttgctattctttccaatttctagactggagctagaaaaattgaatgaagttgtcagcctagtggcaataaccacattaaaatgtttctctgaaagtctttggagcagagtccttgggcatttttaccagtgaccatccatgaagtgacagcactatagacacagggttttgtgtccagagaactttccaccagcccttctggtatgatttactgtgtctgtcttatccaggccctaacacagggcttggagcacaatcagtgatcaataagtgttaactcagtgatagggcagatggtcattgatttaaaaataacaaccttgggccgggcagtggttcacacctgtaatcccagcacattgggaggccgaggcgggcagattacctgaggtaaggtggtcgagaccagcctgaccaacatggtgaaaccccatctctactaaaaatacaaaaattagccaggtgtgatggcacacacttgtaatctcacctactcagggggctgaggcaggagaattgcttgagcctgggagacagaggttgcagtgaaccaagatcgtgccactgcactccagcctgggcgacagagcaagactctgtctcaaaaaaataaaaataaaaataaaaataaccttgcctcgtactgttggggtacacacttccaagcagtgacccttggcagctctgggaagctctgagacgtgttcttccttggagtagtccctctcagcctgcgacactgtccatctaaatctgtggcacaggttctccaactctaggaggccaggaggcgctatgtctgacaatcgtttgaccctgtggctccaggacaccccaacactctggactaaacacactgcaccactcctctccttaaagatcttaaggattgtgctctaattagtttggaaatggaatttcttagactatttctaaaagcagctgcagcctggggacaaattgactaaattcaccagttctcctgaaaatgatatttgaaaggaaagttgagctgcttctatcttcccagagaaatctacatgtcattcagatgttggagaccctcaagaggcagaaatgtcttcatcccctgccgtttgggtactgactaaaaccgttgatccttttccttgaagtctgaggttctgctgttggcctctgaaaagcaggggacagaatattctggcagactctggcaagtagatgaccccttgctgggagtaagcttcagccttttccaaggtctgccacaacagaagcagtaacatgagagcggcactcagtaggacaatgacgatgaggctaatgagagcttttggccgtgagaaacactgcctccccaagcagcattcagatatgtagaaacggtcttgttttacgtgccttggtgcctcgggcctgtacaaagtcaccaacacattcaaactggagtggagaattggggatttaaaaatgtgattgctgaaggcagcaccatcttaacccctggagtcatcgagtgctcatttgctgctaggggacagaaaagccattagagatattccctgggtatgtagcccagttatttttgttttttaacatatatcccaagtgattcaagagcatgacaaggtttgggaattacagtccttgagcacaatctcccattggtactttacaaggttatactttagactaattgaacttgttttatttttattttatctgtaatgatatttgatattcattttgtatataaaataattttgtttttatattttgtatatgtagtatgtagtacaacataattattttgttagtaatatttttattttataatatagtgataatgataatacagtaactgcatataagtacttatatacaagatattgttctattgtaatacaatataatcattttgatagtaacatttttattttgtaatatagtgataatgataataatatagtaactgtatgtaagtactacttattatatacaagatattgttctgaatgcttttacatacattatcgcaattaatcttcacaatgactttttgaaggaggtggtattagtaacatcattttacagatgagaaaagacaggcacaaagaagctaaatgatttgcccaaggttccatagcggtcaagtggtggagcttgaatttatacccagacctggcgattcttaggtctgagacttttaactaccacactgtgctgatccaagtggcctgaagctttacaaaatttgattagagagagttgcatcactaggaaacagagagatataagaagtctgtgggaagggaaagaaagatgccttctctgcagaaataatgtttaagagttttttaagccttaagtaaattagaccatctgtttgtggccaggaacatactcagtggaataatgtcccagccaatagaaaaatagactttgcagaaccccagcagtcagttgctgacatgagtatggaatccacaggaattccaggttactccttgctccggaaataaggaaaagcactaatatgaagtagatcttggcttcacccaacctgggagtgggaggaagtctgcctctgaacgccagaaaaaacctagggatagtaggggacacgaaatgcaagcagattcctcaaatctccacttgaaagctagaaagcttcactatgtattctgcactgacagggaaagacaggtcctaattggatcgactgatccttctcttggtgggagaggccttggcctttgtgaaccaaggaagagatttttatgacaaacttttctagatgctttttagctgaagttaaagaagattatgggtgaattagaaaagggatttataatagaactttggattaatttattcattcataaacatttattgggtgctttggctgaattaggcagtactctaggggatacaggaatgaagaaaaaaatggttcgttcccaagaatcttacaactgagtggtggagacagacagcaaaaccagcaacagcttaatgtggtgtttccatagacatgtttgagaattcctatggtctatcaggcaagggcactttaaacttcttaagggttgggaaagtcaagtgcaaaaaagcccccaaagaaggaggctttgcattatgtcacaaagtagttgcagttacccaggctgatatgcaaagacctccctggcagaaggagcagtgtgtgcacaagaggacagaaggcaagggcaccccacagtcctgcgggtgcacggtgagcaaccagaactagccagctggtcccccaactcatgtcctcttttggtggaatctccacacccagctctacaacctcaagaatcccaagccagggtctaggtctcaatatgaagtcagactctgtttctgaagcctactctgtgattctatgcacaatttcatgctaatattcacctggacaatggaaggcatgaaaagccattcagcctcgtttgtgaagttagaattgtcaaggaaaggggctgatacttctcaagtaatcaggcatggggctaaaggctttctgagttttggccaggaggttgttgtttgattttacgtatcgtctttattatgagctttctcacccaactgttgctgtctgtcttaatcactgaaaaccatcctctcctaacctgcagtcatgttacgatttgttttctcctagtctcatattttctctggatgcatttcatccccagtgtgaggagaagccatccctaaatcctaacgctacattgtgtatttctaagcacttgcctcaaggccccactcccagcagctattgatccctgagagactattatatttatttgcattgacacgggggctcaccaccttaagtgaaaggataaacaattaatgtcccagctcctggaagtcggatggcctttctgggatgccattaagacttgtcttggagagggctgtttaaagtagctgctcagactgaactttaactaattattcaatcaacgatttggcaggtcagtcaatgggaaatgatgcacagtttgctgaaattgatcacacttcatttcccatcaattgtaaagccaaattgtgggtaaagtcataagtaaaggatcattgcctgccattcttaggaccatgtttccctatcccttccatttacttaaaccccagcctcatccataaaagcaagagaattttgcacttacagagggaatcagtataaaatgtttaccaccttctgagatggaaggggaagggagagtgttttctatttcataattgatatgttgcagccacataatcctctaaccttttcctctaaccttttcggcagctcagatgtggaggctggattttaaatcccatgatccattatgcatcacttacttccacatctattaccattccgtcagccaagtgacaggattccccatcagggcctttgactgtgtggggctcttcaactttatgctggcggataggcatgtggaacttcatacatgggtgatttacagacaattagcaggaggcaatggcagattaagtgtagctcttctgaaaaattatgaataaaggatgtaaaaaggaaggtccccccacccaggccctgcccaggaaaaggcttagaatgatccaagcagtgaattttatgacagtaactaccaccctctcagaagatgcaaaatggaatgtgtgcttgtccacattgattggcagcttctgaaaccaatcaccggcccaggtcagtagagccccactggtaggccaacagatcatgaagaaagcagagacacagactcggatttccacataagcttcctcacctgctttgttctcccaagccaactggccttttttcttgcacactgggacctgataaaagcctctggtacttgagatgaaccactagacaataatcagaatggaattttctgggaaatgtggccatatgaaaaaaatgatcactttttcctcacaaggatttgcaaagtggaaagagtaggattttaaaaactgtattttgtagcagagaaaactaaggtttagaaatttgaatgacttccttaacaaatatttattgagaacttgccatgtgctaagcacaatattaagcactgagcttactcggtattagtcggaattctccagagaaacagaaacaataggacactcgcacacaaacacacacacacacacacacacacacacacacacacatggagctttattatgagaagttggcttatgcaattacggaggccaagacatcccatgatcagcagattgcaagctggggactcaggaaagccagtagggtaaatcagtccaacctgagacccaggggagctgatgatataaatcccagtccaaaagcaggaggagatgagatgagatgtcctaatttaagcactgaggcagaaaaacaggttgttaatcctttccttaaccttttgtcctgttcaggccctcaatggatctgataatgccaaccacactgggtaggaccagctactttactgagtccaccaactcaaatgctagtctcatccagaaacaccctcaagacacaccagaagtaatgcttactctgtgaaccctgtagctcagtcctcacagggctcacagtccacccataaatatgtacatatattatgtatcaataaaaattgttctaattgttttaattaaaatgaagagctagtagtctagtggaggagacagacctgaatgcaggcaaaaatgatacaaggtggacagagctgaagcggttgaagtggaagtgctttgggggttcagaggaggggcacctgcctcaattttggggtggcagagggtccagcaaggtctgtgctgaggaaatgacataaggcatcaagaacaagcaggagtgaaccaggtggagaaggcttttcaggcagagggaacagcatatacaaagccccagaggcaagacagggcttcacaggcaaaaggttagaggccaaaatacaaggaggaaaaggggagagaggtgggctggagagacccaggggcctgttcggggaggcgtgtgtgagcttgtaagtagctttctcctcagagccaggcctctgatcccagcatcctgaaaggcagggggctcagtttcagctctagccaaattcaccctcctccacctcctcctcctcttcccctcaaatctccttcatctacccccacatcccctccttctccactcctccccctcatgctcctgtatctcctccctctcctcctcctgtatctcctccctcccctcctgtatcttcccctcctcctcctcctgtcctccccctcctcctcctgtatctcctccccctcctcctcctgtatctcctccccctcctcctcctgtatctcctccccctcctcctcctgtatctcctccccctcatcctcctgtatctcctccccctcctcctcctgaaactcttcctcctctttctccactcctcctcattcttgctagacggaaaaaatagttatttattttttattgatacataataattacacatatttatggagtatgtgtgctattttgaaattttcctttcggtcactgtcaagcacttctggaggtaatgccttttctacaaagtgcacaatggtcattgcacactcaaacatcccccaaccccctgccccctgaaagaaggccatatgggctaagtgatctgatcaaagtcacttggtgctaattagagatggagctgggatttaaggccaggctctctgtcccagctgctttcattgtgtaaactgaacgctgacttggcctctttgtatgtcactcaaaaaactcactgggatgcacacccttttaaatgacatctttttctttttagaattgtttcatgttggagaaaataacatggttctcaagcctttcaacagtcctacatccacaaaaggggaaagggacactgcactgaaattagaatcttcaacaacttcttcaatcttccctttttaattgggtgaaagtaatgtactcctaattatttgagaaatgatgtgataagccccattattaagacctcttttttctgagtgacatgagcaatttaaaaggaagggaaattaacaatggcatgaatggtgcattatgtgctccaagttcgggtacaatcattgaaccaaaagagagggggcaggggaatgagactgggctttctcgtaatatttctgagttggtgagcatgaagggagaaaaaagccagtccaagcttgtgtttcagactctgtaatcaggaaaaggcaaaaaaaaaaaaaaaaaaggtaaagacacagtatctttcccttccttctcaagcagtaaacactgggggacacttctagtgagtgcatctgacatcaatttctattcttcagcatcggaatgtcaatgaagtagaacaggggatgtttccacaagatattaagatgacagacagtcttactctctgttcactggagagtagaattggtagctctccaactggtatgattttagggggtgcaaatacaaatgcctaggggaaccaggaaggagctctccatgggcaaggctggcatgggtgagggtcaagggcacgggagcatggcctctctgcacgtcagggctgctgctccgctctgcatgactgtcatcacaagcaagagggacccagggatccaggtcctctgagttttcaagggaggccaaaggattctaggttttatctttatgtgtttaaatgacaaagctcctcattttgaaatgttgcagtgctgttgacacgttactaataaggtttgtgtccttatgttgtagaaggaaaagtaatggtttgctgaatattattaaaagttcttacgtaggattttgtaagtctcaatagtatgagaaagaatgaatgtgagatagggatttggtattaaatattaaatacaagtcttcagaatatggaggtcatattacagagataatatgtaaagagacataatatagtacaatggaaagaacactacacgtgggatgagaattactcaggatgtccacagacaagggcttcattagccctgcctcagtttcttcatctggagagccaaagattcaattcacagtccatctaggctctcttctaaccttaaccttggtgacagccctagacccacactgaaatccatcagagatccttcattggcgctgagcagtttatgtttcattctgaatgatggagttctcttccattaggcaacttcaggcaagaagaagaagactgtatcaggggttcacaaaataaagaaaaaagaaagcaggaaggagagttctagaaagagccaccctttagaaaaattctggtgcaccttcatcttctcaccatcacgatacccccatttttgcttctaagtctttatagatcataagtcaacttcctaccaacagttaagaatcttaacaacagttagaaactcagaatcctagcagcacaggcatcttctgagtactcaccatgcacgaggcactgtgccaggtacaaacattcatattcctcacaacaaccccaagtgataggtttctagagaactgttactgtacacatcttgcagataggagaactggggctgagaaatggaaaagccatttgtgcaaatccacacagccaggaggaggcagatcacccagcactgactccacagccattgatcctaatcactcccaagaggctgaaacatgtgctacaccagttgggctctgggaatctggcctcagtttaaatcctgcgtctgccacacagtgaatgtccttgaaaaagtaatttaacctctttaaagcctcagttttccgacctgtcattgagaagaatgaagtaactgccacaagttttgaggattagtgagctctacataagggatgtcaggtacattataagcgttcaataaatggtggtgattattgttattagtccactatcattcttaaatatcttgtttcttactgaactgctaggagttgcaaaaccatcctgttaagcaggaaaagcaaggaagccacttaacagatgcaaatggcatttcacaagggagtcagagacaggggctgagaagggactcagatggcttcagcccagctcctagctgactgaacagatcacttccttgaagcctctagaggaagcagtgaaatgatatcaattcccctgagctttggaagggaaaaagattctatcttgcttaaactgttctactgtagagaaatcatatgctttagatgccagggcaggggggagatacccctggatcttcccaaaggtcatttgttgcaggcagagggattaaatacttaccactgcttgctggtatggaacactgaaaacacatcttctctctagatagaatatatgaaacaaaaaggaggctcccttctgccagctgagggaaattgcagggcagtgcactttgtcatcactgtggaagtgcctggtagaacaggtgacattgggcaagagaaagcccttcagtgccagatttgttttcatcactgtgttctgttctcatcatattgtggtgtgagactcgcaaaatctcatgcattctcaccacgggagcctgcatcttcattgctgaagggaagtggagagctcaaagcagttcatgcaggcaattcctccaaaaagttccccaaactatctggagcatcatctcattctccacttcaagttaattccaaaggctggcctggaggaacttctgcacagaatttataattagcccagctttgtggaatagtcaggcctgagtcctttgttcatgctgatatgagtagcagaagggtttctgcaagttcttgcccagttgcaattgaagtgtttaggcggttagctctttctgctagaaaactcaccttgggtgtgcctgccactctggcacatgtcttcaaaaatgtgctttgtcacatttaaatactgatgttttgttcctagttatggaaatgtaggagtgtctgtctgatggttcatttctaacccccaaattcctatcttatactttaaactgccctgaaaatcaaaagcccttggaatcaaactccagatacacagccacattgccaacacactactttagcaaaagatccagaacatattttacatgaaaacctgtcagactggttttttattataaaaataatgtaaagaattgagccaagcacccatgttattctgatgacaaagaaaactaattgtgctaataacactaagcaaagtcttcagcaatcattctgagctgtaaattgggcatgcttttttaactgtggagcctctttatgaggtatatgaagataacaagcatgcttttgaggggattcttgtgtaattgacattttttaagtgccgagaatgtggttctaagacacatttgagactggggtcttgcactcgttaggcagtccaaagtatttttagcttccttctcattggagagctagcatttggggcgtagggagaatgaagcttatgccatgcttttgtttcctttgttgtttgtttgtttgttggggagtgtggggatacaggatctcactttgtcacccaggctggagtacagtggcacagtctcagctcactgcaacctgcacctcccaagctcaagcgatcatcccacctcagctccccaagtagctgggaccataggtgtgcaccaccacactcctctaatttttgtatttcttttagagatgaggtcttgccatgttgcccaggctggtcttgagctcctggactcaagaaatctgcccacctcagcctcccaaagtgctgggattacaggcctgagccactgtgcccggccttatgccatgcctcttactgaatgcacctagtaacaaactaccccacacttggtaattgttcattattattatctctcagaattctgaaatttgcagttagatggaggctgaggctggaatcattaaaggctccgttacacctctgggggctgatgctggctggtggcttgcacctcagcaggagctataggcaggaacacctacagatgtcctcttgttgttacccggggttccgcacagcatggctgctggtttgcagcatcaagtatcccaagacagagagccaggcagaagccacatcaccaattctaatctagccacagaagccacacagtgacactttccactgcattctgttcttcgcaggtgagacactaaggtgagcccatatttagggcaagtgaaactagattctacctcttgatggggaagtgtcaaagaatttgaggagatgaaaaacttcaaatcagtcttttttaaaaaagtagtcaaaccagtctctttttaaaaaagtattcaaacctttcttccatcccctgcttgtaaactcacatcctgaggaataatgacttgaataattctaccagaatccaagaaaccaaattggttgggggcagggggtatgttgcttttattgtttccaagatgaagttctctgtgaaactagaatgtggttcctcttatagaaccctctggaattagcaaatgattcccaaatagtacaggtaagactcctgagtattaatgacttcattatattttgttgccgccatacttcaagtcaggatgcttgatgacttgatgtgatatgtgtgtgtctcctcccatccaccttaagataagcaataggcaatatccaattgtgtgagaacctgcattgttcacatgagcctttgtcctggataacagctcctgttcatcaatatgatacattgcactctgactttctacttctgtctttctttgtggatattcctttctcctctctgattgctttttcttcttagaccattactctagttgatagtgctaggttatcattggatcccatctccctctccaataagcctgtgattgatactaatcttcctcatgggacacattttataggatgcacattggaaaaccactctctaaatcttagctttctatgtgctgacaatttacaaggttgcacctcacacacatctcaggaggcttaaggggaaatttgagagccatgtaatcacacctcctaataagaacagaaatgcctttcatacacagatgctgtcatgccattcagcagtctgtgctgcgccccccgtttgtcttttttcccccagccaacaaaatgcacatctagggaagtgctatctgggaagtggccagttcctagaagcccagcatgaatcatttctctcttctgcaggagagtagtgttttaattattctaatgaaagctttcacttgccattgaatccataaaagcagaaaattaaggaggttgcgaacacctctctgaagcagaaaccttgctttataatatacctgcacctttcctagcaaaactgagaccccaagaaatttatagacacaggatattacccttccagtttaacacatgctttggcattgaaattttacctttccagacccaagaaagtattttgtgaaaagttttaatttctcatttgaagtttgtacccctaaaatatgccagccaagaaagccaatataatgcagtatttgcttacaacaatattagattcagtgtgtcctttaaatgaaggcttgtgtccagaaaatagagggaatcatgggactcaaaactttaaagcaacctaggctagattaatgatttgattattagtttataggaaactcaaaggaggatgctgtggtctcttatacctcagtaaggtcacactatggaccagtaaagtttaagcattaagaaactgggtttgttttgcattttaacttaaaaattcagacccagttatatccattgtgaaaaagtaaatatttaaaaacttgggttttctggaattgcgagatttcattcccaattttgttctcacctctgaaaatgggatacttttttgtattggcccttttaggagaagtgacatctcagacccctcctgtctttcttcctctaccatctgtgttctttatggatatatatttcttggcaaatttggtgtcatgggccacattgtgtctccccaaatttgtacgtggaagtcctaattcccattacttcagactgtgactgtatttgaagatgcaggacgtacttaaggaggtaattaagttgaaatgagacctttagagaggccctaattcaatatgactggtgttcttatgagaagaggttgggacactgaaaacacaggccaagggaccatgtgaggacacagtgagaaggcaggcccctgcaagccaagggaagaggactcagaagaaacccaatctgccaacaccttgatcttggacttcagcctctggaactgttgcggggagggattctgttatttaagccacgcaaccagtggtattttgttatggcagcctagcaaactaatacattggggatttctcctgcatataatagaaactcatttttccatataacaaactaaaacccccttgcacatccctaggtacagctctgtgcatggtgacagtggcataaagctgtaatactctccatgacttagtttcagggccaccggcaccaggcagagactggaacccggtaagcaccattgaagctcttccagcatgggttcccactgagaggcaggcagagcaactggaggtttgtgctgacaaagcggcatggagctataatgtccagagccactcagaactgcaggatggcacaagtcaagaaggaactgtgtcagagcagaggtgaaatctcggacagctcagaaatcttggcactgaaggaggcaggagccttcacagttagattgagagtgggcagttttttctctatctgttgcactttattatattgttttttaaaattattatcatatccagcaccacagggaagggtgaggctgagcacaggggcctggtagaactgggtcattgtagcgccaactagaagagtgtgagctacaaagcaggaagaacagtttctcaaaggggccggatgggggtagtcattggggtgccatgagcaggtgtcctgtgctgatgctggcagattaagcccgcatgggtttgcttcacattttaacttcaaaattcagcctcagttatatctactggagaatatacacatgaataaaagggtcactgttaaggagacagatctgagagagcccagataacaagctgcaaccaggccccaggcagcagaggaaagggctgcttggtcagtgtgggcctggaagcttgggagcttcccagaagccaggaccacagctttattccaacaccctgcagctgacccaatgtgctccccacagagaatgttctcgtaagaccttgtacttttctttcatagcattggctgcagttgtaattttgcatttgtgcaattctttggttaatattggtcttccccaccaaaccgcatgttggtgagggcagctggggctgttttactctccactgtattccctgtacctaaggtggtccttggaaagagctgactctcaggatatttcttgaatgaatgaatgaattgattcatgttaatatcacctccccttctccaagtactcagaatcttgctactggtacaggaacttataagatgcgtggaaggccaaggacaggagacagcatctcccaggggctcactgaaaagcctgtgcccttttccagcctccgggcctcatattgcaggtgcctccaggcgggctggggagcatctcacctctgcctagcactgtgtgctctggatggccagggaaggtctccagggcgggatctgattctagggatttcgcaagggactttgatatgtgagacccagaagctccctgcagagaacaaaggggcagtgtggactgcctgtggagcctgagccaagatatgatctgggcctaagaaggcaccatggcatggctattcagtagtccacagtcctgctctggagcaaaccaagacctaaccagccacagagcaccagaatccccagctggtcagttcagggatttagagaagcttcctttctcccaactccatctgctgtgacccaccttccttagtcagcccctcaccagacaggtcctctttcttgcctctgccctttctaccttcttctgtatccttcccccgctccaggctctctctctgtctgtggattctctttgtcctgggtataggcataaacataataggcattaagaggtactggaaagcctgatcgattctgaagtcttgcactccccagccatcctattaaaaattttaaaatacctaatattccaccaccattatcccttttggctttagaatttacattcttacgcgtggacacaatttactttgtgagaatcaactgtgtctatgaacctgaaatagtctgttaaaaatggatcatggagcccgtgtgctcacgcttgtaattccagaactttgggagaccaaggtgggtggatcacctgaggtcaagagtttgagaccagccaggctaacatggtgaaatcccctctttactaaaaacacaaaaattagccaggtgtggtggcagatgcctgtaattccagatactctggagaatcacttgaacccagaaggtggaggttgcagtgagccgagatcacaccattgaactccagactgggcgacagagcaagactgtcttgaaaaaaaaaaaaatggatcatagagtagatcaattttgatcagaaaatgtcactaataaaggtctggaacatggggtgcatctgtagccacatgggatccttgggtggcccggaggctgtggtggggtgaccagttgggggtaacatggtaaggatgcttggaagaagaaagtgagagaagggggtcaatggaaagacataggtcagtgggctcacagcctcgtccactgtgccgggtcatccagtcccactcaggctccctccctcctgctgcccctcctccaggcagtcttctcccctgcagctacagggccccagctgccaggccccagagacccacccaccctccacgggtgggaaacatgaacacaggcaggtcagctcagtcttctatcacaaagctcacatacatagggaggcccagcctcgtccaaggctgatttcaggaaagaagattattctccaagattttctcttaggaggcagcaccacaaaatggaagaggaactgactgtaagttctaacctgaattctagtcttggctttggcagtaactcactgggtgaccttgggcaagttccttcgcctcccagggcttctctttcttccatggcacttatgtggtttattttaaaggtcatgcatgctatctttgacctgtctgctgccattttctttggaaaaaagagccctgggagatatgattaaggagagagtcctggcctgttagccaggggagccctcctgcccagaccctgtaagcactctggataaccctctgctcctcttatgttaatttcctcctctttctcacctatcctgctgtctccatataagggcacagcacggccaattgcatttaaaattgccttctaaaaggcacacacatgcatcctggctggtcagtctttgtgtggagctgggactgattcatctcaggggcgtaattccagctttggcactggcttgtggaggtgtcattgagaggggttcagagggctaagcttaccaaccccccagaagaggggacacatagccttggctccatgtgccaagcagcagcataatatgcagggctctgcaaagtcagcagagaaaggacagcaggtgtcaaccactgcacatgttttacttatttattgatttacagtccatcttcccagtttgtatatagcctccttcatagtagagattcagcctcattagctgtctctggcatccttagcttgcagaatggtgcctggaagatagtggaccactaaagaacactttctgaatgaatgaatgaatgaatgaatgaatgaatgaatgaatgaatgaaaatgtgttaggtacaagtgttgtgctgtggaacacactcctggattctggctcctgccccacaggcttgtccccaaactgatgaagagcaaggcaggcactgcgcacagtggtttgggtcatcagcagtccaagaatgttttccccagtgtaggtgctcccccaggttgatgggagtctgggagaggtggtgctgacaagagagtttcttcacctccactccaaagacagaaagcaacgaaagttaatgacagaagcaagcagcaggtgccagtgccagctccactgctcagtgcttctggatcctttcacggttctgtaatgtactcagtccccaaaggtatatctcctgccttctaatcacttacaacaaaaacacatgttgccctttacaccaaagataaattgaaaggtgttcaggttctcttctacttgggcttatgaccaagtctcagagcacctacattagggggcaggggtgaagtatactttcccattggcctcttccaattgctggaagtgcgagcttaagaggggtgaccatttattgagcgtttactgtgtgtgttgaaaactgtgccaagctctgtaaataagacaacatcccaaggcaaggcgactgcaatctcctgagaaatgctggcaaacaaaccaccattataaccgagttggagtaattcagggcagagatggtggagggctggactgaggagcacaatgggaactgggagacgcagagttgagagaaattgagggttataagacttaatgattgatttgttgaggagaaggaaagggagggtttaatgtgactcccgggtttctggcatgggaagccaggtgggattacaaccttcactgcatggaagacagagtggcagatctggggagactgaagttgagttcagctttagacgtgtttggtggtgatgttctgatgtgccgtccaagtggaaaatctcattaggaattggaattatttaataccagatatcatttaatgagtgggggagttttattgtttcagtatttttacacttcaatagtgctttagagagacatgtcctcttgtgtttgacaaaacactgatttgcagttctggtatccctcctgagtaagtcttatttttgagataaacatcacatcagccccgagtgcaactaaaaatgagctgggccagggcagtggggactgcagtctgtcaaggctctgtatttaacaatgcctttctccagtggcctctgccctgtgcctcccacactgtcagctctaaaggatatttagtccttgcagcctcaaattctttaacccttctttggcctcttaagacaagccctgggtatcactgaaacctaaggcatgtccagaaacaagcacaaaagaagaatgtgaccactgctgcttaacctggccagagaaattcactaagtcttgcacctgaaaaaccgaaacaaaacttcctagcaaatcaggttcccacaatcaaaggatggaaaatctcactggaggttggaaaaatgatcagagcctcttcaaaacttcaggacatcaaaagacctcactgtactcttattagaaatcaagctggaaggaaacatcatagtccttcaagtgacacatgaacgaatggaaagccgaaacccactttctgcagcttcagaaattcatatttttattcattcaaccaacatttattgagtgtcttttatatttaaaacactttgtgggacagtgtgggacacaaagaaaaagaaagttattctgtctcccaatgaagtgacacacaaatggctgagtttggtgaagaaataactgcagtgagtagtggggtttgctgatagcagtggaggaggtggaagctcctctacagattagcttattgaaccctcacagctttatgagctcgggtctagcattaccattattttataggtgagggaactaagacacagggaagttgagaaattttcccaaagtcaacagttggtaagtgatgggatttgaacccaagcaatcattattaaagacaactctgctgaataagtagcttttacataggacctggaatgttgggttggctgtcaaaaactgcagctgggacagctgggagtgcatttcagatgaaggctattctaacaggaaaggcaaggacaggttacatttggatacgtgggtggtggtccagtgtgggcatgtgtagagttcttgaaatggatcagtggaaaataagctataaagggtcacttttagaaatatagacttccctctttagggatgagggggttacagaagatcattacgttggagtgacatgatcagaactgtattttagaaagaacacatgactcctgcactctagccacttagtacaataagtggaaaaaagagaaagtttcctggcttctgaaacaacgagtatagttacattgcctgctgtcacaaagggatccccaaagatgtgtaatagctcaaaaatgacagcttttgtcttgttcacatggtcaaaaaagtgggaggttctactatgtctcatccaaaccatggtttagggacttggtctccttctgttctttggctctgtcacgttcaatgtgtggcttccaatgttactatgccatgtgtatcaaggtgtcagaaagggaaagagagtggagaagacagttgcttctgaagttttccaatgacctctgctcctgttccattaggaggcacagggctctccctagaggcatggggactagaaacgaagtccctgactgggcagccacttccatctgtgactccatactgtggaaggaaagcatgaattttggtggaaagttagtcatcaccatcatacctgagtgaggaaagaaaaacacatttacccttcagcagtaacttttcaaagtagtctgacacctcattttgaagcctggttgagaaatgagttttacgagcaaatgaggcttaaaacaacataagcacagtcccatttagcaccaaatcttatttgtctaaattattgttgaaggttccaaattgattttatactttcctacctaagtgaacaaaacttaatttaagcttttcttgatgacttaggatcaccattatgaatgtcatttatgggaatgcagtgtgttgtataccagcagcttttgagtggtgtggaaatgttagttcctgggctgaatgcctcctgaattctaggctgttccattaagtctcttcattaacctcttgggtcccttagaatttttacagtcactgtgtattctcaatacctcccatttctatgtttctctgctttctgatttctcctgccatttttattatttactaacccattcatgtaggttttcttttttcttctttaagactccccaatcctcttttctttccagtcctttcactgattttgttttgcatattatggtggaaagagcaggcacacatgtgggagtggctttggcctcagcactgacactagctgtgctgcagaaactatgaccttgagcaatttaacccctgagcccctgtttcctcaatataaactaaggtggtaatatggatctcacaggcttacattggggttaactgagatgctagtaatagtataaaaattcatctgtaaaaattgatcgtcattatgactgttattttggcagttggacctggtttttattgtcgtcgtcaatagaaatagaaagagtccataggactccagggagttggaatccagacatgaacagaggaatagctagaatactcgagacatctctatggagtggacagctgaagccatgagtcaggctcctgaaagtctccaagaggttatagatctactaatgtgcttaagcagaatctcaagaaaggtctaatataaatggatgaagccataagaggaatatcaagaaaagaagactggataaaaatattccctgtttctaagaaaagaagaagttttctaaaccttgaaactcttttaagctatcaatcctatctgccaccattcactcccagccttcttgaaggagcagggggcctccatctcttcttgccaggaatctgcttcttgtattttacaattccttgccaaatctgggcagagtcagcggagtgaaggcagttgtgtctgggcagtctgcctaagagtttccattacataaacagtaggtgcttaataacttgcattgtgcacataaaagggaaaaagaagaaaatgtgatttttcactgctacagagtaaaccattctgtggccccagaggatgcatcatgtttagcaagattaaagcaggtggcaaagtccctccccagtgggtacatcacagctaatgtccatcaatgattagcaaatgagtagacggtgcctttgtcaataatcctgtttctaccctcatgctttatttatttagctaatggctgcctagctggtagctcatcaagatggtgtttactgagcttggcaaagtgaaaaattatgattttgtttactcatgtgtttccagctggggtgctgagttgttatccaggcagctgatgaccgttcttccactctcagagcccctaacacaggcagttcagtaaacaaaccatcagcttgagaaccagagcatcaacactgccacaatctggttatttgctactttgcagtcgtcagtgtccagaacctcaaatgatgactcattctggaacctcccttatacttagataataaaacaaatagaagtcaggttaagtgtaattggtttagtttgagctattcagttgtttatgagaaaaatgagtatttgctccaaattaaatatttgatttgggatagttttgtctcttgctctatactcaagcatgtaaaaatagaatggaaacccaaacagaaaacctgggagagactatcactctggaatggttctcacacatgcactaactaatttagttatttgtacagcaaatatatagtgagtacctactgtgtattaggtcctggggatattgtggtgacttaaacccaacacaaacatgaacctagttcttcagaaccttgcaactttgtaggaaagagagacattgaatcagtgattgtcaatatgatgagaattataaagggagaaacagggtgcttcagtagtcttggagtttagggaaggatccttgagaaagtgatgctttgaatgggagatgaaggagttccaaaaatcatagacagcgaaaggcagagagggtaagcttaaatattattattatctcagttaagtcacaaaataactctgcgaggtcagtattattgctccggtttacaattgaggagacttgggttccaggggaagcacgtgcaaagacctgagaccagactttatgaatagtgccacttggagctacaaggtcgagcaaaggcagtgtggctggagtagagaggaaccatgagaggcatgagatacagagggacttgccaaggagttcctaattaaaagtgcattttagaaagccactctggctggtatggagaatggattgaggtggatgtaggaggactggcttagaggcatggcagtgactgggtgaaaaagatagtgagttgaaccaggggtggagtcaggggaagcaacctgcaggaagatagaaatgattaacgtcaacagacatacaggaggttgggtcagcagggtcagtgagtggctggatatgaggggagaggcactgacaggttattctacatggctctctttatatctgtaacaattgagccataataatactaatagctgctccttactgagtgtctaccatagtcattctatagatgagaaaactgagactgagagtagggaagtacctaccaatagatgactgaactgagatctgagccccagcctgactcccaagccagtgctctctccactctaacactgtatttatgattctggtcaattcaatatttttctcatttggttgactgaaacctcagatttttcccccaatgtaattcagctatatatacgactccaagttctcataattcttttgcatttgaccattaattctcagttatcttccagatttcgagccatgctatgtttatcttcaggccatttcaaacagcagaggccagagaagccagttttgtggaatcgggcttgtcgggccacattaaatatcacctcactctaatgaaaatgcaggtttttgtttgttctaatgagcgcagggggcctttatgtccaatctcttcctagaggaagtaattgcatacgagtgacctttgaaggaaatcacatcagggagttatttgaaggcactgaggtgagccagtgcgtaacatcaaccaatgtactagcatttcagaaaagaaacaaataggcctgtcccactgacaactcatccatgccccctttggacagagaaaaatcatctactgcttgctgagaaagtgaggcactgaggcacagagatttctttaactatttcttgaacacctactgtatgccatgcactgtgcagaatcgctgcctcatggcactcctgttttagtggcagggaacagacaatacagaaatttttaaaaagtttaaatcattaaagattttgataattaccatgaaggaaacaaattggatcatgagaggtggtgaactgtacctcaacttcctcatctagttaaaaaggagagaatggtggaacttgcctcttggggctgtcttcaggactaggttagataacgtatgtattgggctcggaagaggtcctggcacattagttgaacacttagtcgtgttatgtggggtaacatcgttgttatagaataagtgggggaggcagtcaggaagggcctcctggaggaggtgacatttaagctgagacctgagcgatgaggagccaagcttatgaacaactgggaaagcaaaggctggagaccagagaaggaatgcttactgtttcccaggaacagaaaggagagggaaatcagccaggccggagaatagagagtagggtggggagtgaaatgagtgagggccatgaggcagacaagattccaaccaggtaattaactcagttttactctataagcaggggaagggagtggtgtgagctatgctttgaaaccccactctggcagctgcgcagagaatgacctgaaaggtgaaagctgcaagacaaaggaggagaactgcaaagtcgaggcactggtgggagggtgttaggcagagggtagcgaccttgttggtggcaaagtattagtttcttagggctaccagaataaattatcacaaatcggctgtgtaaaaaccacagaaatttactctctcacagttctggaggttaaaagtatgaaatcaaggtgttggcacagcgcttgttccccctgcaagctctagggaatgatacttccttgcatcttccagcttctggtggttgccagcgaatcctccgtgttcctcacctactagatgcatcaccccaatctctgcctctgtcatcacgtggtgctctccctgtgtatctctgtgttttgtgtctcttcttataacttcaccggtgactggattgagagcctaccctcatccagtatgacctcaccctgacttacatctcaattacatctgcaaaacctctgtttctagataagatcatattcacaggtaccagagagtagggcttcaacatagcttttgagggaagcagaaaacccacaacagcaaggtgagtcctgactgtcccacctctaaggggatgtcctggcttgaaagtagccccccatggcccagcttctggggtaagcaaaaccgccagccatgcacaaaggcattcagcatctttcctgtaattgggggttgaaatgctgtatagcgattcccagttgcttattccaaataagcaggcaggtggtgcagaggaaggcagcctgcagagtgagggcagcatgtcaaacaagggatgttccttcttatttgtctgtttccttaaaaccacttacacttctaggttgcaacttaagtgtactattatttaaggattccttttcggtgagtacccagtgactttgaacagtctatggatacaggtggattttcttggatttttagaagtgaggagacttggggttcatcccagatgctacctttcgtgtatggttttgaacaaatcccatagccccctgaggttccacttcttctgtaaaatgaggatgctggcccagcccagtggttcttaaccttgaggatgaatcagaagcactggagggcttgggaaaacacagattgctgggccccatcatggagcatctgattcagaaggtctagggcagtgcctgaatattcacatttctggcaagttcctagactttgttgttgctgctggcctgggaaccacactgtgagaattgctggcctagatcatctctgagatttctgcaacaatattattccataagtctatgaagctcattttaatgtaaatgactagatgaagtgaattttctaaccttagctagcaaaatttggatcccatataaaaatatgtcccagctactgctcactctgtttttcactttgggtttacctctctagacttaagggtgttgtacagagaatagaaagagagaggggccatttaaacaacacccttaagtatagagaggtacccaaattttgctagctaagactagaaaattcacttcatctcctgtggctagtggggcctccacatacaaggctcccagagaagtcagctgaatgttggcttggagcccaatagaatcacttagctttggtggcacttatttagggtggagggtggggcatagtagatgcaattgaaagcctgagaataatggcataaataagcccatgaaaagatgttcatcattagtcacttggaaaatgcaaatcaaaagcacagtgaggtacttcttttcacccattagaataatcaaaagagacagtactaagtgatgacaaggatgtagagaaattggaactagtgggtgggaatataaaatggtgtagccactttggaaagtagtttagcagtttttcaaaatgttaaacaaaattgtcatatgacccagtaattcccctgctagacttccattcaagaaaaaaaatgaaaacatatgtccacataaaaatttgtatgtgaatgtttataataccattattcacaataaccaaaaaatggagacaaatccaatgtacatcgaatgatgactgaataaacaaaatgtggtatggacaaaaataatcaaagtactgacacatgctagatacatatgtgtatatgtacaagatgacgctgaattttgatgaacctcaaaattactatgctaaatgaaagaaacaagacacaaaagactatatattttattgttccatttatgcgaaatgtccagaaaaggccaatctttagagataaaaagtagattagtggttgcctagggctggacatggaagggacagtgactataaatggacatgagatttcttttcaggatgatggaaatgttctaaaattaggtcatgctgatggttgcccaactctctaaatatacaaaaaaattatttttaattcatgttttaaattgagggattttatggtttgcaaattaatctcaataaagctgttaaaaataattttacaaatagaatggaattaaataaaaaaactaatgggatttcctgcacctccctctgaaggtcatttagtgctgaaggtggttatgacatatgcagattccaaatactgggctttagaaaatattatcctagttacccagtcagaaaagatcaggaactgcttactggaagaatggggacacttaaaacacaataaacacatctatttcacactccttatgtgccagacactgtggttaagtgctttacatggcttatcattcacttattctttgcaaagtatatttgttgaacaccttctatgtgctgggcactgtccttggtgctgaagatactgtgtgaataacacaaagtccctcctttcggggagcttaaacgtgtagatgtacaaatattatcttaagattattttaggtagtgatacatgaatttaaacaaaaacctggatgatgagaggtagttacagtaggtgggaaagggaacagtttagattgagtggtcaaggaaagcctccctggggaggcggtctgaggtaacacgtggaaaagtcatcatgcagacatgaggagaagagtggcttgggtgggaggaattgctaacataaagtatatcagacagcaagcagtagagaaatgacagtgtaagcaagggagagttctgtacaggatgatgctgaaaggatacacaaggatagaagctgcagatcttgagagccatgacacagagctcagtttaaagtttggcttttcatggaatagtatacagccatgaaaaatgaaatcatgtcctttgcaacaacaatatggatacagctggaggccattatccaaagtgaattagtgcaagaacagaaaaccagatgccacatgttcttacttataagtgggaactaagcattgggtgttcatggacatacagatggcaaaatagacactggagactactagagtggggaaggagtgatggggcaagagttgaaaaaactattgagtactatcctcactacatttgtgatgggatcattcatgcctcaaaactcagtatcacacattatacccatgtaacaaatctgcatgtgtacccctgcatctaaaataaaagttaaaattataaaagtaaatataaaaataaatataaaataaagtttggcttcttattccaaaagcaataagaagcaaatagtaagatctaagcaggtgagtgacataatttgatttacatattaaaggggaccctaggatctacataggaacagaaatataaaagatagaataaaagaagtgaacttaagagctaagagtgctgcaggaactacaagacaatgggggcttagatgaagatggtggcagcagggatggtgagaagtggtaggatctggggcatatgtagtaggatagacccaacaggattgtctgagttgtaaagggcagagaaaaagaggtatcaagaaagatccttgaatttgggcttgagcacctgggtagaaggtgcaccattacttgagatggcaaagcttccctttgagtttggctttactatcttcgtgtcatagatgaaaaatggggctcagaaaagctaagcaactttgcttcaaattacctttctaatgagtagaagaagcagagtcaaagtcagtgactcaaaaaactatcttctaaactgctcagtactgccttctgcccacggatttcttgcatccttggccagccagtagatggaaatcagatgaggtggcattcactgggtggagacagaaagacttcttggcagtgaaggctggtgggtgggcttgtcatagaacaaaaaagaaaggaacagcttggaagagtaacacttttctagtgaatcacattaaataatcagcatggcttatacccagtgtcagcctgaactgagattgacagctaataaaaagcacagtaattacaggaaaacatcagattggaaagtacagagattcttgaaacacctgaagccatttaatatgtcttatgtttgctccagactaacaggcagctcccagagcaagaccggtctcattactgagctaatggacattatgctctgaggtacttttccctctgccaaatatatcagaattttaaaaacggaagcctgatattgccatgctgcaaatgtttacaaggacatcgctgagtgttttaggtgtcaagtttaatttcagttggcctggcctattctcttaaggaaggctccagagcagtcagccaggtcacagggagaattccttctgctcttgctcttcaggctgtgacagaaatcagaccttgattccctgagcacgcttcccaagaagggattgctcctgtcaccacagcccaaaggagttagttgtgatgaaagttgtcatgcttcgctattccattattttaggtatgtttgggggttttgttggtgatggtgctggtttttgttgttgttgctgggggtgggcaggggtgatggaaggagaaactcattcacacattctaaaatattcatgagtcctcctctaaattgcagatagtatcttagattctgggatgatggcaaatacttaaaattaccaaagcacaaaagagacagcaaaaataaaatggtaagatctgagtgtgcattcacatgtgtgtgtgtatctgcacactccctctagagaccccacccacctgcctcccactggctcctgtacagcatgctggcttctgggggcctgggctgtagctctgagcatcagcagcctggagaacagtcactcttccatgtgctgtgcattttcctgggcatttttcacctcacaacagctctaatgaccttggcatcaagctcttactggggattaataactggctgggcttaatggtccttactgtgtcccgggccattttcccagccagccattaattccaggcagtgccctggactctggtcattatggttccctgggctgagaggctgcccagtggcaaatggccacagcctcctctgcagacagaggtttccacagcctaccaccctttctctttgtggcatctttagcaaggcctggggtttacagccaaataattggttatggcatcacattatgtctactttgtatgtggcagcaggtaggtttctcagaggatagataaggcagggggttgggtttcattcactcatttattcatccatctattcagtattaattaaatgatttttcttatgagtcaggatggaagagagactactaatctaggagtgaactaagatagatgcctatgtttcctaagaaggaacagagtgtctcaccaaatgaggctttacggaaaatgttccaaagaatcggggaggctgaacactatgaggaaaaagtcagagagaaggccttgctcagcggagagcccgctggagccacctcccctcttgtgtcttcggcagtacatcatctcccaggccgacgggcagagattcaagttcacctccctgtgttccacttagtgattcatcaacccagcatctgaatgcttaagggaagaacatgtaaatattgcatcaggaatcttgactcaccaaggcatgaatatttccacccatatcattaagacactaaaggttataatggtactgagagtgtgggagcatgcttctctcagaggactgtaccaaatcatgaggaacagggtcgcacaatttgtacaattttttgccattctgcctcctaagatatcatcagtccccctgaatacaagaaacagacttcattttgtcctttggaagtgggtcagcctttagtacatgctcttctcagctgctggaattgtaacattatgtttagaacagctattgtcattttattggcacgccttaccaaaagcacctaaggcatacttcagacttcgatcttttttgcattgtttgatgcatctgcacaactcaaagaacgagtgttagtgtctgacataatcaataccagagctcagatttctcaggtagcagaaatcaagagggtggcttttggggactgggtcaacctggcatgttctagtggtgcccactaatcacagagggtcagtatggcaaggtcaggaaacttggccttctcggaaagagtgttcagctggcctgctctgggcaaagagaaaagagagagcgccaggtccttggaaggcccctaaggcgatgtgtttcacctgccaaccagtctctgttctgagaatcaaagcagaataattaattaaggggaaagagatgctactgggacctttcttcagaatgttttccctagtaataatgactacagtaaaattacagatccaaccggaaaattcaggataattctaggtgagcgtgatgagaaaaagcagcttcccatggccttagggtccactgggatgaacttacaaagtaaccttattaagcaaatgtgctgagttacacagaacctcaggggtgtattaagtcctcagtgaaggtctttagaatgaatgaacaaatcaatgttgtctggccacaagtatttagtgtcaaagtcagtcctgccatgctccaccatcaaccctctgtcaactctttgcagtcagctgtggtctctacttcctcaatccgaccacgatcacactcttgtcacttctgttcagctgagactattttggccgaagtcatcaaatccaaagcacatttcccaagtcttgttttacttgtcctatgacactgttgactacttgctcctttttaaaattgtctcttctgctggtttccattacataatcctttcctggttgttctctcacctctctggctcttctggataggcttaaatgttccctcatctttggtcccatggtcccttgtgcctaattgcattatagcacttacagcacagttctgtcatggtttgtctgggggcaccctcaatgtggactgtatgctcttttattgtgttattaaggttggcgcaaaagtaattgtggttttggccattacttttaatggcaattagttttgcgctaacataatatctgtagcaccaggttcagtgcctggtacgtaataggaatttcaccattgaataaattatcatggaactcttccctcttcatcatttatgtatgggatgtgcaagtaaaataagggaaaggaaagttaagcatttcctccattttttggccactgaaattgcctctcatcccaacagttcgcccagggattcaggactccttactccagatttcagtagttttctgaggggaataggggccactttctggacatctggaatgtggcacttcctaaagaaggtttggtctcaaccacatttcagcatcatgtacttaatgttctagttagatgaatctatttcaaatgatcctccaaggaatggaggtctttggtagaagattcttgtcactttactgcatccactgagcccagtgccctcagagtggtaacaacactactgattaaaaaatagcatcactgaatttctaagaggcaggaaagaggcaatgaggtaagaaaacatcccataacactgattctgcttattctactgcactgtgttggcatcatggtgaatccctttgtctctgcagtcaggtttcttgggttcaaatttcaacactgccaccgccttacagtgtgatcttgagcaaactgcttcatttttctacccttcaatattctcatttgtaaaatgggagtgataatatactatcttagagtattatttgaaggattaatggaattatatttataaaaaatcagaacagtgcctaacacagttgtggctgaaaagcactcagtaaatattaactgactggccagttttcctttgtgcccccagctttgctgtgctctccacagccccttactccgacttcagcagagcctcctctccttatactgtatcacactgtattgtcctcctttactgaccactgtccctcactaaagtgtaagctttcaaggctatttgccccatttttgcattctgactgcctagcacagtgcctgtcatgtaagagtaattagatgttgggggaattatgagaatttgcaatggtagaacctccatttcataagccctgcatcaattataaaccctaagtgttcactgctgatatcgtgagtacttattgtacaattactttatggacccctgcattctcttctaaatgggtgataggaaccctggacaagagcaaaaggctccgcactgaccaataatcctaatagcacctaacatttagtgaatgatcactatgacaatcctatgctaaaggttcaaccgtatgcagttgctatttttgcaggccaaatattggcagtttcaaagggctcaatcgaatacggtatctatcttaatttttttttattctaccatagtagaatgaggttttaacctcagttagagatgagaaaactgagacttgtggaggttagtgtcttaccaaggtcccacagctagtaggtggtggaagcaaggctgggcccatcctgctacatcccagagctgatgctttgaggcaccacaaggcaagggaagttggctgccctcgggtgctctcagtgtagttctgaagacacagccatgtctcaggaaactcccaaaataaacacaaaactgaatatatgcactactaagttggattcaatttcctgagacagtacaggaagccagcgtgtcctgttcaaagttaacagagaagaagcgcatagactctggaaaaaatctaacaatgcaacatcccttcagaacatcttgttattttcttgtacatttgctggccttggcctcgggccgtaattacattatcttcaaacagcaactagaaatattgctcattaaacatgaacacgggaatgtttaatttgttaggacgtaggtgttttgaaagcaaatcattggttcagggcattgaactgagtgctgccattggagttgtctttggtgaacaccatgtcctggccagaactttgccatgatgcgtgttcactgcagatgagagaaggacctaggccctgcaattcctagctggggtctgtggctctgagcttgacgctttctttatgtttatgaaaatgggacaactcagtttctctccctcatccgttaaaatagaagaagcaatcctaatgtcacttcaaaattatggcctctaaggggttacaatcagcatgtcatttcccatatgatgcttagatgatgtgtatttggtacaaacatatttgtacagcatccaagaattttaatcaaggtttaactttcaataaggtgagttaagagcatcacaactagtgtcacagcaatttgcaggatagtctttgcttcaacttgggagtaactttggactcaaaaatacctagttttgaaagccggaagcacaactttattactggctaggaataaagggcaactttggacaaatttgttaacatctctatgcttaagtatcttcatctgtaaaatgaccacgagagaaaccttgctgggttgatgtgtcgatttggttatttaatatcagtaaagcccttagttcagtgtttgacaggtcagtgctagctcccttttgctcttgtccattgttccctgtcacccatttagaagagaacgcaagggtccataaagtaatagcagaagggatatactctgacatgatggggaggagagaagagatgggtgcccttcttcaaaggcagggaagtagcctgctggtgctgagtgagggttaagccctttgcccctgacagtgtccttctccccctgccttccagcccctgaaaatgcactgcagggactgtgccctggtgaccagctcagggcatctgctgcacagtcggcaaggctcccagattgaccagacagagtgtgtcatccgcatgaatgacgcccccacacgcggctatgggcgtgacgcgggcaatcgcaccagcctgagggtcatcgcgcattccagcatccagaggatcctccgcaaccgccatgacctgctcaacgtgagccagggcaccgtgttcatcttctggggccccagcagctacatgcggcgggacggcaagggccaggtctacaacaacctgcatctcctgagccaggtgctgccccggctgaaggccttcatgattactcgccacaagatgctgcagtttgatgagctcttcaagcaggagactggcaaagacaggtacaaaggcacagggaagaagatgcaggggagggtgaggataagtcatcactggctgactcacccaaagcaaagcttttgctacaggcttttgttgtgggctccactgctcatgtcattgctagagttcacttgtagggtcctctgcgtgactgggctgctcaagctgactttacaagacaaagtgaaaagaagcatggagataattatatggatatttcagggccttatttttgaggaagaggctacacagctcctggccttcattggttaaaagtgcagtataacagctttattgcatttcattttacttgcataaaccctcaccaaaaaaaaagtatatgggtttattttttcccattcaaaggcaaacatttatttagtcaaccaatatttcttgagtgcccactacttgctcatcactgtgcttggccctggggaaacagtcaaacacaagtatataaagccttggacacttaccaagtagtagccagtgcactgagggtcttgagagggaagaaaatggtgctgtagatgtgccatgggccctagcccatggaaacccaaactgttagctacaactccatattaagacacgaaatcaatgtagtgaggcactgaaagattttttttctaaagtaatgggaagaatgggataaaatggaacagagtagaatagaaaagacattatcagcattcatcccacatagtaagttaggtaaggtattgtttcatgaaacttttatttcagtttgatagagatggagatagatggatagggatttcttctcaaagtgatgaaaatgttctgaaattagtggtgatggttgcacaatcctgtgaatgtaaaataaatatcactgaattacacactttagaaaatgaaattaaaactgtgtctgtgtgtctcaatcatgatgtaaaaatgtatttttcactataggttgaaagatttggaaattactggtctgggagataaggaaaatgctttctcaaaaagatgtacataagctgagacccagggcaataagtcttggataaagtaaaggacctggggagtgggagggagaaacctccctggaggtccagggaatcaggtgtgagagaacatgcagtgggttggagaaaagccccctgtggctgcagtcaggagaactagggggtgggggtgacacaaggtgaagaagagaggtgaaaagatgtcagctggacaaatctaggtgaagaaaggacaatgaagaatcaagggccactagagagtacagctctgggttggaactctggctctgtcactctctagttgtgagggcctggacaagttatctaaccttttagagactcagtgaccttacgtgtgaaaagggaatagtgactactaatcgctggatggactggtctaataatcaaattgcctcatttccttaattctaaaacctgtactttcatacgtttgtgatgtaatttacccctcttacaaaaactgttactgagtcaattgcttatctttaaactaaaggagagtcagacttagtggtgcatgcctataatcccagctacttgaaaggctgaggcaagaggatggcttgagcccaggagttcaaatccagtgtgagcaacatagcaagaccccatctcataaaaattgttttaaataaagtgatatgataaatgcaataaagaatataaagtaataaatccattctttggctagcagctcattattagagaatagtctcaaagaaagacttaagtacagtgcccccaaattctttgtgtggaagagctagatagcttttaaatcctagaaaccttgtgactagtcaaggactgcaccaggcaggaggcatgggtctggtggaggaaggagaaagagctggctgttggcactgtggccttcctcactggaaggcccagcagaccccatgggcagcccagccagcagatcacattggggattctgatcatcatctccagctgccacaaaatccagtcatgcattgacctttgcaactcacagataagagagactgtcactcagttgaatgagttatttaatcaagaaaacattttataaggaatcaagaaggaggggaattatttagtttcattttttacttgttggaaaatttgaaataagtagaaaccatctcaatagaaaacacttttctcttttttagtttaatggttgattgctaaataagtattcctaaaacactgccgcaatgttagctatttagtataattaaacattgttctggactccttgagaaatcattttaagctgataagttagatactaagtcatcataccctttggccactcaggatctttaggaacccttctcacagcaaggcatatcctgctcactaaattcactaaatactggccaatgagaagctttttctcaccaggtctttcttcctggtcgtcctggctggtacggagggagccaaagctttgtggagtggctggtgggactctttccacagacatccatctgccagggtccacgtagtccctactcaggggaatcacacttatgaatgtggaggatgccagagtacactgctgcttccagaaactttgtgcctcttgccttcgggaaacagtcttaaagaagccaatactctattgacttaatattctttacctgtagcctgctccaagctaaaagaaacaagtcagaaatggccattcaggacaaaactatttctgtaaattaaaacctaaaacatttagggtgtaatggtatttctcaatgtatgcttttcttcaaacccaacaaaacagtagcatatgatacataaagtacagaatatctaacttgcagatctcatgatcaggactttccttttgggtgaatattttgaagaaatagggtcatttaatagattgtgattgatagaagtttcaccctccttaaaagtggagaaaaaagtggctcaggaacaatctgcaattaagaagcatgacaaatgacttagatggccaagtggtattctttgatattaaaaagtaactgtacttgaaaataactttataattgaataagggtacattaggaaaatatgattcagaaccaatattatagtaattagataaaggaagcgtaaatgaaataactgcaggaagaatatttccatagagattataaatgagattctggtggagcagaaaggcccttaattgtaatttagtatgcactatagaattatcagctcagtgtgttacttcatcatataaaagaatatctgataattttccctaaaaagcacatgacagctcttcatattctttcattacagctgattaagtgtaaaaacagtagatattcctttgttagaaaaagagttcaacaaagagttttagaaagacagcacaaagtgttgcatttctatagcacgtgaccccagaaggctgttatttaggaagtctggggaattttaagtgttactttaaagaactcttcactttagtttctttcgtcctctaccttgcattcttttccccattttacccacaaagccttttcctgtgcagccacatcctcctgtattcaggctgtggtttacaatctctactacatcacataaaacagaaccagagttatgggagagtttctgcccttggagaaagccccctttggtgtgtccaatagctctaaaagcagagggaatataagtgtgattcccagattaggctcctgaagctgtaagtgagctgtcatcctcttcctgggttccacatcctcccagttattcactcacccagattaggtctagaacacatggccagtgcattgtcgcagcccataggtgaaaacagcttctaacttaagggaagccacttcctcttcttaccctttgccattcagtcagctcttctccattccagctccttcagtctcaaaggtcttatgaatatatagccttagtgagaaagaaggaaaatcattaatacctatgtaggctgaaggcttctgaatttcataattcctgccctgactactgatggcagtccctacacagcccccagtagcagaatgttggaagaattttcttcatggttgctaaaaagcaccaaaaagaatggtgaaattatttaccttgattgctcaacctagaaactaaaagaggaggaagagatgtcaacgtaccaacataccaaacttggtgcttttcatacatgcttgcttatttagctctcaagtagcccaggggacagagattcctatgcctcctttatagataagaaatgaagggccaaagatcaacaataacttgcctcaggtcatccagctggttatgatagaaacaggtaagattcagcccacttattcccatctttaggagcttttaaatatgctttctgggatgttactaggtcaaaatacaatggaataggggaatgaatgagcaaagggcttaagaaatagaaagttgaagccatgatccccaggaataactaagccacccatgctgtcaggtattggacaaaatgaaggactccttaaaaatgtcctctctctatttttttttcttttttggtccttatatgaaatgaaaataatgatgcaaactgatagacagaaggttttccttcttctcaaggatgggtgccacacagtgcaagtagaaaagccttcctgcacctctgttattcacatcacaaatgatgctatggctgggcaaagtcagacagtctgaccttggggataaggtgtttgaaactggctaatgaggcatgccgtaagtactgaaggaaaagtaaaagcagcaacccccgaagaattgaaattaatatccacagtagtgtagcatggtaggctgagtcattctcacaggatcaaattagaccttggtgttatgtctccacagttatcctaaggtgtagcatatggtagaagctcattacagatgtctgaatgggaaaattaatgaatggtggggtgcaccagttcattccttaaattttgtcaatttttggtctcctagtaaaaattttctgatatgtaaaatgaagcaaatgttcagttaaatataagcattcctgtggctcttttcctctggtcattagcccatacccaaatgagtgtacccttcttacggaaagatattcaatcaagatgttggtgttagtctacttgaaggcaagctttcaccctaagttcagtcaatcaaccaattgactaatagatagataaatacatgtgaatgtttatttatatttaataagctactcattatctagcctgtttggggaacaaggagaatttctagttactcaagtgttctcgttaagaaagagttgttaaacgggggctgtcataagaaattgagttgtggtaacatacacttaaacatttaaacactgatcatcatctttgatgatgcagaagtcccttgagcatctttcattgtcacaaattcagcatgagcattaacatcaattatgattgtactgtggaatatggtaatgttagtaagagatgtcaatttgataaagttccagatatttaccaaatggaggagagagggagagactcttgtttatagttagccttactctaggaaagaattaaagatggtagtgggtataatggttactttaccagcttgcagacttaattattgttccttccaggaagatatccaacacttggctcagcactggctggtttacaatgacaattgcactggagctctgtgacaggatcaatgtttatggcatggtgcccccagacttctgcaggtaggatttattctgcaagtgtaaatcatcagccgtgttgtgcaggatttataaatatctgattctgaatatcaaccatgaaacatgtctaactgtcttcttgaagcaattaattagcatgtcccaagttctcattctagaaacaacaaacagcatttaattatgttatataaaatattgaaagtttttgtttgtactgctggagaataaatccatcttgtgggctccatttatcctctgaatatttatcagccagaagtaatgcaataattggcataatattaacgatgaacaagcattaagaaatattagttttactctcatttcaaaggaatgtgataattttttaatgaattaaagagagcaattcctttgacagtgagggcttttttctaaaattaaaatatttctctgagcctccttcccttgccacatcagtggcctgggcttgcacttctaaggccaaaagcacaggcataaatattttgaggtgtcactttaaagagaacatgcatacatctctgttgccaccttaactttcctcctggcatgtgcccaggcagagttcagggcataccacaaatgcactcagcaatattcagggcctgatttttggaagcctgcttgaaaactcgcctgtaatttaaaatagtgagaccagaaattccagaaagtaccctagtttttgggaacgcctgatggcctgcacatggactcaatcctgattttcaaatggcaaaagctggggtggggggcatttaaaacttgctttttaaattgtgtgcttacttatactatctggtgttttatttgtttattttttctaacaatgtctcgaaggccatgagtctttaggcaaaagctgcaatttggaggtttaaagcaaagatgagaaacagcatctaatcatcccattaacattttaccacttttctctctttttaacccaaagatccaacacagcaacaatactaattgatatggaagagtcaggccgcaaaggaggagagagaggtacagatagagcagacctttgatgtaaggtcagggtcaaaaatgctggggctaggctgcacaggtgtaaagcctggcctggtcacttacccacctagtatgaccttgaagaagtcacttagtgtctctaggtctcagcttcctcatccatagacgtggatgtgatagtaatagactctgcctcaaagggctgtaggcagagtaaataagctaatacatgtgaaatgcttggaacagtgcctagtaagtacatggcaagcacaaggcaagttagcttggatcctcacccagtgctgcctcacttaattcactggccctgtgtccctgtttaacaatctatacacaaaaagtaagtagaatggcctaaaaaggcaaactgcctcctcaaaccaacaggctaacagagacagtgagaatggcacttatgggcatgcaaagagccatcaacgttgatgggtatacagcagatataattatgcaatattgccattaggatgccagaaagaaaaagcatgaataaattgaaatgttaatgacttcaagtgttcaaggaaatattccatttattatggaaaacaaatgaaaggcaagttaacctgtcatttctcctactcagagttagttcatcatgacttcatgtacggtaggatcgaaacaatttatggaaaatactaacaaagaaattaagataatgtcaatgcattacatattgccactggctctgagtttctcttcctaagctatcatccccaaagctttgatagttgtttgcacaagacagtttcagcaagaactcttcaaaaggacccctacgcccaagttctgtcagagaagtgaagagtgtcatctggaggaaaggttcagtgctggagagagcattctgctcagtcataaagcctgttaaaggaaggttaagaaggaagaccaggagtagcacagatggattctacagttctattcatctgcatttccaggacatgttgactggaccaccaggcatccagtttcgacttgttgggtcttgaggcttgttttccttgtttgtaaaatggggataagaaaataagaagacgaacaagcaggtcatggtgagaattaaatgagataatagatgtagagtgttggatgcagttcctagcacacagtattcaggaaagagtatcaatatcattaatattaataagatatgtaaaataatttatattattaatattatcccaagcacttgagagtttccctgaaagataccaagaattctgagcagggggctggttcacaactataatcccagcactttgggaggctgaggcaagcaaattgcttgagctcaggagttcaagaccagcctggccaacatgacgaaaccctgtctctacaaaaaatacaaaaattagccaggcatgatagtgtgcacctgtaatcccagctactcgggtggctgagcatgagaatcgcttgaacctgggaggcggaggatgcagtgagccgagatcattccactgccctccagccggggcgacaaagtgaggctctgtctcaaaaaaaaaaaaaaaaaaaaaacaattttaaggggggcttcaaagacacagcttcttgcctcctggaggcttataataagccttacccatgccaaaatataaagaacacagcaaagccacttaccatgtgactataaaaagatgcagcttttgcaatcttcatctaagagttaaatgagtctgtaaacagtaccttcctcaccaccagagaatgaaaaagcaactggtaggctagtctgctactcatttgaccattccctcttttatctttattttgaaagaagcagagaactatttggggctgaaaacatggtacatgtatcatgagctctatggcttaaggaggtaagctatcgccagggccaaaaatggttgtggatggttttgtgtggtggcagagctcacattggctgggcccattggaatatagcctccctgagggcagagttctgtgtgtttacttcagtgttgtagacctagaacacaggacagtagatatttactctcctggcatatggcagatacttcataaatatcaagggaatgaatggctgtgtcctctactctccgtagtgctatagtaaagggtgttgtatatggataaaaatagccatttctgcctctcagaaactctgactttgagaaagttacctgacctcactgagccttagtgactgatattgggcaagctacctaatgctccatctcagaagccttacccacaaaatggtgatgacaattatcatataaactctcttgcattgagagtttatacgataattgcatgaagtcatagatgaggaatgcttagcaaagtctcagggcctgttcagtacacagaaagttatggggtgaaaggattcactgatctgcagttgtggatgctcattggcgcattttacagaactggcattatgtggcctccagctccttgcaggacatctcatgggctgctcaaagtgtgcctggcctttctacagcttccctaagttcccagtgtctcactgcaatgaagagctagccacgtggagccagatttcagcaggcaaaaagagagccaactcttcagtttgggcaaattaaccatttcagaccataagacaaaattagtaccctcaaaaaagtcactaactaaataaaccacaagccttttattcattcagctaactcgtgttgggtaccagggaggtaatcagagatgaatgagacagggtctctgccttcagttgcctgagactcagttgaccacaattaaatcatgaggtacagaaggttactcgaggtgcctgtgggagaagatgttcactctctgcctgtcagcagcatctgacccactgagctttattggaccatctgtctccaactttcaaactggactcagagaagtccttgcattccactgattctatcaggtggcatagggataaggagccaggacaacaggaatattggacccttccacccgacttggtcaggggcagacccagttggctctgtttgcatctggactattgtataagatttcttttcaacaaaagagcatttgacaaataagaactttaacaacctctggtctaagacacaaccatgatgctttccaatctaaatcaaactctttcacacttttcaggagagtagaatcatcaccttattattgtcccaaagagaatgtaagctgtcataggcatggtgtgagggagcagaggcagtggggcagagagagaagggctaaattatatcttgggggagcaaactgccaagcaatccgtgagtgcctgatccccaaggggaagtgtaggtaacctggagagtcatttcccatcaggtgtcctggaggtctgccttctcatctcacccaaagggcctgagttacttctaggagtcagtcattggcaagaaaactaattgtaccccctaaaagtattaagcccatggacttcttaggaagaaagatagcattgcattcacatttaaaaccccaagtggaagtggtgggcatataaatggccatggtggcagatgacagacatatctcattcaagatctggcagaatctaactgactcaaagtcatttgaatggcatgcagcatctttcatttggtactgtgatggcctcctggactgctctctccatcacttgtcttcttcctctccaaacatgactgccttactagatgacaaatctgactgtgaagagtcacttaaaactcctcagtgacttcccaaagctttgtgagcagagttcatactccctagcttagcacacaagaccttcaggatagggcttctgcataccactttagtcacatcttctctactgatgcatttatgtgtttatttgtttattcaaccttactgaaaaattcataaaggaactcaccctgcagacacctgttcctatgacctcagtttggactgcccatcccctacttccttaagctggctggttttccactggctctttactaataacattaatggctgatatttgttgtgcacatacttcatgctggctctgtgcttaacatgaacacatgcattattttcttgaaccttataataatcttatgaggtaagcatcattaatatcaccattttacatagaaggcttaaagacatgaaacagctgcccatggtcatagggcaaataaatagcagagctggaatttgaatgcagtctgcagggctcaagagccaatgctcttaatccttcagttcattgtttcagatacagtggcccttctttctcagctctccttagccccctgtctgagtcagacctactgggcccactgggcatccctcttcctctgccttgccccatctcactgattggtttgtccatctcctttgtttgactctaggctccttaagaggagggccctgtctcaatccacatttgtatcattagcacttgtcattgtgtctggcatagagtgtatcttcagtacagattagttcaatgagaaacaaaaataagccctgtccatgggggtgtttaagagattgattctaaacgttattattgcaagaccaaaagtgccaggcacattaaaactataactagcaaattcagattttgagaagtcaatgagggccacattgttttattttcagccagagccagctctgggtactcaaagaggggctcaggcatcagcccccatcctgcctgtatcaccagacttcaggcacatcaaagttgagaaagctggagaaaattaatgccatgttgcaccagaaacagcatcaaaatatattattcagtggacagtggactcttaaatcatgccatatccatactgtaagccaaattcattctctctagatggcctataaattgcgtgaaaagatctgttgtcgttgctttccaaactaagttatgctaagtatttaatctcattttccattataaattatttgtgataataatgggccaagcatttaaattctacctaataatcttatttctggtcatacttagcacattaccaagtttacaactctctgttacccaccatttcttgagtattaattagcggggtaatgattcagagtgatcactgtcatggaactaaattaatatctcatccgcaatatgaaggacatctcaaaggtatcatgaatatcagagagttgatgctgccagaattattagctagcgaacattaataaagctgccagcctaacagggaaagttcttacttggcgacagtccaccgggtagaatcggaagcttactcacagaagacgggtgtggaatggcaatgccgcccatgtggtttatgttttatgaagtagacttaaaatatatggttgtgtttctcccagggtgagggtggggcttgagtgattcactgtggctctttgtcccatgaactgtgggcagctgcaggctcttggtgctccatgcgcctagacacacaatgctattccatgggcttccaaggtatacagctcttttcctcccataagaagatccaaggaccagaaatcaaggcagcagaataagggtggctcagggcacctccaggactgtgacagatgcttgggaaggactgctgcaggaatgttttcttctcaatgcctcatagtgtcaccaagcccccagagcaagccaattgcagaacaacctagcagcttcacagctattaattcaactctattctctctattcttcaaacatttcctgagtacctactatatgccaggtactgcaccaagaatagaaatgtgtttaaagagagtgtctaagagttctagagagaggcaaagacaccattctttcctcaggatatttgcagccttctgcatagtccagccccaaacccagtgggcagggttaacctagatcacactataggagagaaaaagtaatttcttttcctcatccatcataggttctttgctgagactcctaggaaaaaaagacagattaacaagagaaaagcatacacatttatttaatataaattttacgtgacaccagagccttcagaaatgaagagccaaagaaacagggagacctccttatttttatgctaagcttgatgaggaagtggatagctgtgaagaagtaggattggacaaagcaggtgtgatctgatggtaataaaccagggtgggtgggaggaggtagcaaggtatgtttgttcagattcttttgacatttccttgtctttgaagataaggatgttcatttcctccggatatatggagggtacctctggaatgaaagtttatgacctgctttagacgagggcaaagaaatcttttatgaactgcatcagaggagaacagtgaagggaggtgaaagtgatctccctgcttctgttgtttcctcaaatgccaaggtaccatattttggagcaacatgtcctaaacctcgtcagtacccagaaatggaagtgtcttcccttgcttgttagggttatgaggtttttttcagttgtaaaacttagctttagaagagtcaaaaagtggaacattacaaacccctgttgccattagcaccgatgggcagaattgcacatgagcacaaagcctctgtttaacaccctgagcagctcgcaagcaccacacatggggctcctctgtagcaagagctcggaggaaagcggcaaggacaagctgctttcaaccacacactgttgatcccagggaaacctgggtgccattagtacagaaaccccacctgggggaaaggagtttttccaagacacagaacctcactcttaagagtacagagtcaactggagtcaactggctttggtccaaaccttggctgcgaaacttcagtttttctgtgcatgagtttcctcgtctgcagagtaggggtgctaatagtagctctctgctatagtttggatatgttttgtttgttcccaccaaatctcatgttgaaatttgatcctcagtgttggacgtggggcctagtggcaggtgtttgggtcatgggggcagatccctcatgaatagattagtgccctccctggggcggggcatgagtgagttctcactctatttgcccccaacagagctagttgttaaaaagagcctggcacctccccctttctcttcttcctctctcgccttgtgatttatgcacatgccagctccccttcactttctgctaggagtggaagcagcctggggctctccccagatgcccaaccttgaattttttgagacatcagaatcatgggccaaataaggcttttttctttataaattacccagacttgggtattcttttctagcaacacaaaatggactgacactgtcttataggggtgttgtgaggactaaataagtgagtgtatgtggagtgctgagcactgtgttctgagctgaaatagtcaagtccagcagcttggatggacaataagtcaggttgtgtgctgaaagccaggcagtggactgtctccctgggtatcagatgctccctatcaaatgggagctgcaatacttgcctcagagggctgatgaggatgtaaaggagatcacatcagttaagcgcagaagctgagcaggtacttacaaaatcagttgtctcaaacttagctgcatattagaatctcaaggagctttccaccatttgaatcttctaaaaagctttgttgttatgatatgtattatttaaaaatatgtttatttttgtttcaaataattttagagttacagaaaggttgcaaaaataatactgagagttcatataacttttatccagcttcccctaatgcggatttgcattcctatggtccaattatcaaaagtaagaaattaacatgagtataatgctcagctaaactacaggcattattgagattttaccagtttctctactaatgtcctttatgtcctccaagaacgaatccaggttccctttgcatttatttatcaggtgtcctcagtctctaaatccatggccgttcctcaggctttccctgcatttcatgacacttttgatgaggactagtcacgtatttcatagaatgtccttcacttggggtttatctaatgttttcctgtgcttagattgaggttatgcattactgagaaggataccacagaagccataggcccttcccagaatctcataacaggaagtatgtgatgtccatacgtcttattactggcaatgttaaccttcatcacttggttaaggtaatgtctgctgggtttacctattgtaaagatagtatttttccctttgtcattaataaataacttgggagagatactttcaggttatgcaggtagcctatttctcctcatctttttccccattaatgttctgttcatttggtgcatcttgcctgcgacaattactgcaacgttctgaggatggtttcctagtccctcattttttctacattgtttattggaatttttctgtcttgaaatgctgtttcttctcctccatttatttgtttatttattcagttatttattgaaattatcatggactcatggatatttattttattttattggttttataatccaatactgacattgtttattttggttcaaacctaagacactttctaaaatacctgtgcctgagttcctctccaagtcatccgaagcagagtctatggggttggagcataggtatttccttaaagctccccaaccgcactaaatgttagttccctcactctccccacctgcttcctctaaaaagaaaaaaaaattcttcctcaaatcattctgcagggcttgttctcaaactggctgtcagagtgtgcatggcaggctgcagccacttggggaactggttctgtggttatctccattcctgcctccccagcccgcatatcctttccttcagctcacggggcccacaatgggaacttgagtaccagaattccttttacaactgcttcctcatgtggaaattccgctgaggtttattgtagttttcactgaggtcaggtgaaggaagaaaaaaactagggcagtctttagaaagtcaggtttgagaaaagacccaaggaagtatgaccttcagctaggagtgtctttctaaatggcatagtgaatttagtgaattccagctgatggcaggctcacagctggggtagatgttcctgcagtttccagcgctgccttctgagtcccagaaagcacttttctgctgcttggacagagttttaacatgtggaaacaactcgcttacatgaataacttatcttgacacctctgaaatcacagtaaccaaatatgtaaatttaattctctttttaggggatcaatatggagtcagataagttttttttccaaagagatggtcttcctgaataaggaaattgatcctgtagcatctttagctggtttccaattgccccctactcctaggtgccgaatcaatcttatgatatttttagaaacctaactgtttctttagtcagattgatgccaataaaatgtccaaaacttagatgaatcaaatttaaagtgatttgtgatggaataaaagcttaaccccaagcataccatggcaacatgaaattggcatggttcccccaaattatgccatatgaatatgggaagatatgtctcacaaattcttatttttttcttcatagtggtcagcttcaacctgaatttttgttagaaggcattttttgtgttaaaaacaccttctattaaaattttaatgggattccaatttctagggtaagtaaattaataaaatctgcaataactagtcaggaaaggatccagtgtttcactacagaacatagagataattccaagacgggcatattagagatgcaaagtgttaattcagcatagcatccaaaccaggataaggaatgtttagatgctgcatgacaaaaataaatctctcttcctggaagaactttaacctaagaggagaaacagctcaaaggtttattgttgtcagagccaaaaacatgacacccctcttgataaaagacttcgatccctgaccccagtagagttgctactctaaaagctatttgtgtattgatctcctctgaagaaaacgaataggtgtctggcaggatgagcatctttgggaaaccaagttattatacttagaggagagcccaggtgaccaaagtgggaaccctagggcatcaggctctgaaagatgatttgcaagatgctgggaagcctgggccttttctcttcttagtctctgcaacaaggccagttgctgagcatagctcaaattaggaaagtttgtctgccaagaaaccttgactaatcttaccattcattcttcaaaagacagaagaggtgggctagactggcctgttttagaaaccagtctgagaccaagactctttagtgcgtaaatatttattaaccctcaaacaagggcacctaccacccccacatgttaatcctatgcacaccatcttgaagaaatgagccagtacttcctgtttgaggctgagacagagatatagaggcagaaaaacactcggagactctcaggccaccaaacaaggactgaggatgtagagtttctggactaaaagactgtagactttgagtacataggccctctgaagcatcaaaagaaaaatcgtggcctcttgtttgctgtcttcctttttctcccataggatcaaactaagatcatcaactttccaaactcagagaagaaatttgcgtttagctgctaattccatataaatttagaagtttgctatttagctgctaattccatataaatttctttcaacaacataatttttaaaattatttattaagcacctaccagggactgttccaggaataagacaaaacactgccctcatgaacacccaataaacaagtaaacagcaacaacaattccagacagcaattgatgctataaagaaaatgaattcaagtgagatgaagtgaggggagcaagtgtcaggtaaggcctctcagagaaggatattacttgagctgacacccaaaggtgaggagtgaactcagagagggtattccaggcaagtgaccaccatcaagtgcaaaggccctgaagtagggatgagctttgtagagttgaccagaaaggccagtatggtgggaacatactgggaatccacaaggctgggtggattaggagaagacttagaaggggagccacatcataatgcatcccagcagccatgctctctgtataactggaagcctctggaagcttagtggagtggggaatgggaatgacatattttgttttggtaatatctctgcagctgcttatggtaaatagactgtaagaagagtgaaaacaatactattgttgtgacttattaatatgtagggtctaaatctgaggagactgaatgttctgcagctcattttcaatctctttgatgaaaatgatgggcactgattttatttcacaacctcaaaacctctccacttccttattgtgtaatcagaaaaaccatttgttcaaactcatttaactagaaaatacaatttttatcagcttattaaagataacatcttacctcaatcagtcaaaggaaaaaaaatttttttgctttaatcagttatctcaatttcctcctacagggatcccaatcacccttcagtaccttatcattattatgaaccttttggacctgatgaatgtacaatgtacctctcccatgagcgaggacgcaagggcagtcatcaccgctttatcacagagaaacgagtctttaagaactgggcacggacattcaatattcacttttttcaaccagactggaaaccagaatcacttgctataaatcatcctgagaataaacctgtgttctaaggaatgagcatgccagactgtaatcccaggtattcactgcatcagacaccgagacactgaacttcctgagccaccagacaggaaagggtagcagaaaacagcttcactcctcaggaagtaccatggacagacgcctaccaggggtgacaaagcagtgcagttggattgtaaggaaaaattccggaattaatgcatcctaatgaatgttgtccccttcaatggtgttaccttaggagctgaacattcaattcagttacaccactatgactaaaaacagtttggatctcttagtattgcctttgaaactgcaacataagcaactcaacaatattagttgcattcctttatagacataccatgtcaaagacgtttttctatcaagttgtattctttcctgttctataacctttgtcatctgttagactctgtatgtgtgatttgtaaaaagcaggctgaaactatggacatgatttctgaagagcacatctccactgactttcataaagcaaatgtccaatatttatttattgagagttttttagtgcaatctgggccagtatttttatagattatgattatgtggtaatttatccttcctaactctttaatcctgaatgatggttggaaatggcctagaattaggttactctgttcacaatgctcattgttagcatgcaattggtatttgacttggaagtgttgtgttgtattttttgaacccctaggcttcaggaaaactgctcttttgtaaaaagaatagcgatgacattttctaatgtgcagaaatgttccaaaaggacaaaattgaaaaccaaaaactatgttattaaaacaaaaaaatgctaacaagagaaatttaaaggtagttttctttagtaataatttatgtaagtgtcctctcttgagccctagtttcctttttggcagaatgatgtcactgtaccagacaacctcttaggtttcatcccaaatctaaacttgtggcctcttcttgacccatttgaagactctgcacttggagtgatggggccccaacagtagcaggaactttattttggggagccttatctacattcatattacttatatcactcttgtggttaaaactacacttcttcctgtgtccacatgggctaaaatctaccccctgcttctctcgaagcatcaccatccgcctcttccccagcctctcaacacaaaaacacaggatacacacacacacacacacacaaaagacatagctccaaggggttccctggctacaatagcaaacagctgcccttctgtgaggaaaagagactacaaggacatgccctatcattcaactcatttatgctatgaactgtttagactcactacaaatcttcttagattatattcattaccattccctggtctgaaggagtataaaggacttattttattcagagccaagataaattcatattatagatttttatttaaacaagtaatattgttcaaaaatagtctcttataaatatactagtgttttctttacacatgacttagaaggcattagtttctctaatgccaaatttgaaggcaccagcaaatattatgtatgaagactgacattgttttacagacatgacctggcttatgataaaagaagttttatcgcattaccacttcttttcccttttcttaattagtacactaactagtactattaattacacggagtattgttgttaaaatgcaaacacaatcagggtactcacataacataaacaaagttgatattgatgtgtatggcttgggctgttcaaagccagtaagattgaaatggccgtccaaaacatactggaatatgttctttaagttttctcatagtttttaaagggactatgaattttattccaacacattgtcttccacagcatggactctgaacacatcatactttatcaacatatgaaaaagtgtattaattttatacaatttacttataggccacctttataatcacttgaagacgttatgttgctcaaacataagtggctcctttggcaatttctatatttgtggaaatttggaaaggcatagtttcaacatgcaagaatgtaattatattgcttcatctaataatatctcacatatctgtctatcttcagattttagattttctttattaaaaaaaccatcatggtagctccatctcgtttgtaacttctccctctcaaatactcagaagaatgaagaggccaaattcagaaaatcatggcttcactgggaaatgttttaaatctacatgtagctaggatatgtgatttcatattttttaaaaatgtggtgtaaataagtgtaaaaaattaccacttgcaaagtggttttattacagcgttaaagaaaatgactagaattctgatagattgtgctgatgaacctggttgtgggcaattgaattcttgtcttcccactaccatttcatgactgtcgtctgaacactattcaacaccattaaatataaactctgatataaaagatgactacagaaccatgtttatagacctcggtgatttcagtatctgattgtgtttgatgcctaagtcatactcgttatgttacatgcctttttcctctctcccagctgtgtcatcagctccctcctagcttttaagaccacagtaatacaatgccacagctggtcgatccatggcttctgttatttcaacacaagaacatttggcagaggccattacaatagatagccattatgggcaaagatacgggaatttgcaaacaaaatcaatcacttcaaatggcccataaaaggaggaatctcagatttaatattctacggtaaatattcacccaagaaagcatacattaaaagaacattaggaggtaaatattcagcatgctgcatggagacttagctgtgtgatttccattaccgttaatgggcatttggcaactaagtccctgtgctttgctaaccctggtgtgtactcctaagggctacacataaaacctgagcaattcagagacttctgaggtcatcagatttcagagtaagatcttttctttaaaaaaaaaaatagatgaaagcaaaacacaacgtattgtacctaaaagagaaatttgtgtggtctctcacaatccttaggttactaccagatttgtgtatcctttgttttctgaagttctctccattactgatctatttgaatgacatgagaatggagggaaataatctcattttgaaataaaaactcccctcaaaaattaaaattaccgacttagaagatgataaatgctaagtaaaagtagaaggagaaagttgaaattctattaggattaagacagtgttatttaaaggcacatgcacccatttagtacctgcctaaatatttgcccttgtgtaagagcaaactcatttcagaaatatatcctgaattccaccagggtgatggttcaaattgttaaataaacctactctgaaagaagggtccatgttcctattctctctctgcagtgttgggaggtgatgttaacactctacatgttttgtatctgacccaatcatttcttccattctcattgcttctctcttaaacctcattgtatctctttactgtcattttctcccaattgtcttcttttgtctacagtgtgctcctaaaccagcagtctttggtgctgttaaggtcttccttgtaggtttttaaactaaagatctatctgggaaacagatttggggtaggtcctgccagagtaatgaccatggtaggtgggaggaatatatctggctaccatacaaggtacttcagaagtaccattatggtttgcccagggccaagtggggagtgaagaagaggggtccccaagacacagacttcagtgctaaaaccagggaagtcctgggctccatgacagtggctcaccctatcagaaggccacgtcaaagagaactataataataagccctggggggcaggatgtgtgaaccaattgcctaggtgttagcacatgccagaaggtactttggaatggaaagaggtgagagtgtctcaaggtttaaaaatgagcaagtgtagcccctcttttgtagctcactcatcccaccttctcagggtgttgaaatgcaaatgcaaaaaggctgaaaccctgtttctttctactcagtgccctaatattatatactaccttgaattgtgcttcgtctttttatgcatgtgtcctgttagtctaattagattgtaagctccttgagggcagagactctttctcctttgtctctgcagcctatacctagtatagtgccttgcacacaataggtgctcaataaatgtctgttgttgatcatgacctcttaa

SEQ ID NO: 3 - RNA, 5547 nt, homo sapien
aguuuuaauucugucucuaaucucugcaacagccgcgcuucccgggucccgcggcucccgcgcgcgaucugccgcggccggcugcugggcaaaaaucagagccgccuccgccccauuacccaucauggaaacccuccaggaaaaaguggccccggacgcgcgagccugaggauucugcacaaaagaggugcccaaaaugaagacccugaugcgccauggucuggcaguguguuuagcgcucaccaccaugugcaccagcuuguugcuaguguacagcagccucggcggccagaaggagcggcccccgcagcagcagcagcagcagcagcaacagcagcagcaggcgucggccaccggcagcucgcagccggcggcggagagcagcacccagcagcgccccgggguccccgcgggaccgcggccacuggacggauaccucggaguggcggaccacaagccccugaaaaugcacugcagggacugugcccuggugaccagcucagggcaucugcugcacagucggcaaggcucccagauugaccagacagagugugucauccgcaugaaugacgcccccacacgcggcuaugggcgugacgugggcaaucgcaccagccugagggucaucgcgcauuccagcauccagaggauccuccgcaaccgccaugaccugcucaacgugagccagggcaccguguucaucuucuggggccccagcagcuacaugcggcgggacggcaagggccaggucuacaacaaccugcaucuccugagccaggugcugccccggcugaaggccuucaugauuacucgccacaagaugcugcaguuugaugagcucuucaagcaggagacuggcaaagacaggaagauauccaacacuuggcucagcacuggcugguuuacaaugacaauugcacuggagcucugugacaggaucaauguuuauggcauggugcccccagacuucugcagggaucccaaucacccuucaguaccuuaucauuauuaugaaccuuuuggaccugaugaauguacaauguaccucucccaugagcgaggacgcaagggcagucaucaccgcuuuaucacagagaaacgagucuuuaagaacugggcacggacauucaauauucacuuuuuucaaccagacuggaaaccagaaucacuugcuauaaaucauccugagaauaaaccuguguucuaaggaaugagcaugccagacuguaaucccagguauucacugcaucagacaccgagacacugaacuuccugagccaccagacaggaaaggguagcagaaaacagcuucacuccucaggaaguaccauggacagacgccuaccaggggugacaaagcagugcaguuggauuguaaggaaaaauuccggaauuaaugcauccuaaugaauguuguccccuucaaugguguuaccuuaggagcugaacauucaauucaguuacaccacuaugacuaaaaacaguuuggaucucuuaguauugccuuugaaacugcaacauaagcaacucaacaauauuaguugcauuccuuuauagacauaccaugucaaagacguuuuucuaucaaguuguauucuuuccuguucuauaaccuuugucaucuguuagacucuguaugugugauuuguaaaaagcaggcugaaacuauggacaugauuucugaagagcacaucuccacugacuuucauaaagcaaauguccaauauuuauuuauugagaguuuuuuagugcaaucugggccaguauuuuuauagauuaugauuaugugguaauuuauccuuccuaacucuuuaauccugaaugaugguuggaaauggccuagaauuagguuacucuguucacaaugcucauuguuagcaugcaauugguauuugacuuggaaguguuguguuguauuuuuugaaccccuaggcuucaggaaaacugcucuuuuguaaaaagaauagcgaugacauuuucuaaugugcagaaauguuccaaaaggacaaaauugaaaaccaaaaacuauguuauuaaaacaaaaaaaugcuaacaagagaaauuuaaagguaguuuucuuuaguaauaauuuauguaaguguccucucuugagcccuaguuuccuuuuuggcagaaugaugucacuguaccagacaaccucuuagguuucaucccaaaucuaaacuuguggccucuucuugacccauuugaagacucugcacuuggagugauggggccccaacaguagcaggaacuuuauuuuggggagccuuaucuacauucauauuacuuauaucacucuugugguuaaaacuacacuucuuccuguguccacaugggcuaaaaucuacccccugcuucucucgaagcaucaccauccgccucuuccccagccucucaacacaaaaacacaggauacacacacacacacacacacaaaagacauagcuccaagggguucccuggcuacaauagcaaacagcugcccuucugugaggaaaagagacuacaaggacaugcccuaucauucaacucauuuaugcuaugaacuguuuagacucacuacaaaucuucuuagauuauauucauuaccauucccuggucugaaggaguauaaaggacuuauuuuauucagagccaagauaaauucauauuauagauuuuuauuuaaacaaguaauauuguucaaaaauagucucuuauaaauauacuaguguuuucuuuacacaugacuuagaaggcauuaguuucucuaaugccaaauuugaaggcaccagcaaauauuauguaugaagacugacauuguuuuacagacaugaccuggcuuaugauaaaagaaguuuuaucgcauuaccacuucuuuucccuuuucuuaauuaguacacuaacuaguacuauuaauuacacggaguauuguuguuaaaaugcaaacacaaucaggguacucacauaacauaaacaaaguugauauugauguguauggcuugggcuguucaaagccaguaagauugaaauggccguccaaaacauacuggaauauguucuuuaaguuuucucauaguuuuuaaagggacuaugaauuuuauuccaacacauugucuuccacagcauggacucugaacacaucauacuuuaucaacauaugaaaaaguguauuaauuuuauacaauuuacuuauaggccaccuuuauaaucacuugaagacguuauguugcucaaacauaaguggcuccuuuggcaauuucuauauuuguggaaauuuggaaaggcauaguuucaacaugcaagaauguaauuauauugcuucaucuaauaauaucucacauaucugucuaucuucagauuuuagauuuucuuuauuaaaaaaaccaucaugguagcuccaucucguuuguaacuucucccucucaaauacucagaagaaugaagaggccaaauucagaaaaucauggcuucacugggaaauguuuuaaaucuacauguagcuaggauaugugauuucauauuuuuuaaaaaugugguguaaauaaguguaaaaaauuaccacuugcaaagugguuuuauuacagcguuaaagaaaaugacuagaauucugauagauugugcugaugaaccugguugugggcaauugaauucuugucuucccacuaccauuucaugacugucgucugaacacuauucaacaccauuaaauauaaacucugauauaaaagaugacuacagaaccauguuuauagaccucggugauuucaguaucugauuguguuugaugccuaagucauacucguuauguuacaugccuuuuuccucucucccagcugugucaucagcucccuccuagcuuuuaagaccacaguaauacaaugccacagcuggucgauccauggcuucuguuauuucaacacaagaacauuuggcagaggccauuacaauagauagccauuaugggcaaagauacgggaauuugcaaacaaaaucaaucacuucaaauggcccauaaaaggaggaaucucagauuuaauauucuacgguaaauauucacccaagaaagcauacauuaaaagaacauuaggagguaaauauucagcaugcugcauggagacuuagcugugugauuuccauuaccguuaaugggcauuuggcaacuaagucccugugcuuugcuaacccugguguguacuccuaagggcuacacauaaaaccugagcaauucagagacuucugaggucaucagauuucagaguaagaucuuuucuuuaaaaaaaaaaauagaugaaagcaaaacacaacguauuguaccuaaaagagaaauuuguguggucucucacaauccuuagguuacuaccagauuuguguauccuuuguuuucugaaguucucuccauuacugaucuauuugaaugacaugagaauggagggaaauaaucucauuuugaaauaaaaacuccccucaaaaauuaaaauuaccgacuuagaagaugauaaaugcuaaguaaaaguagaaggagaaaguugaaauucuauuaggauuaagacaguguuauuuaaaggcacaugcacccauuuaguaccugccuaaauauuugcccuuguguaagagcaaacucauuucagaaauauauccugaauuccaccagggugaugguucaaauuguuaaauaaaccuacucugaaagaaggguccauguuccuauucucucucugcaguguugggaggugauguuaacacucuacauguuuuguaucugacccaaucauuucuuccauucucauugcuucucucuuaaaccucauuguaucucuuuacugucauuuucucccaauugucuucuuuugucuacagugugcuccuaaaccagcagucuuuggugcuguuaaggucuuccuuguagguuuuuaaacuaaagaucuaucugggaaacagauuugggguagguccugccagaguaaugaccaugguaggugggaggaauauaucuggcuaccauacaagguacuucagaaguaccauuaugguuugcccagggccaaguggggagugaagaagagggguccccaagacacagacuucagugcuaaaaccagggaaguccugggcuccaugacaguggcucacccuaucagaaggccacgucaaagagaacuauaauaauaagcccuggggggcaggaugugugaaccaauugccuagguguuagcacaugccagaagguacuuuggaauggaaagaggugagagugucucaagguuuaaaaaugagcaaguguagccccucuuuuguagcucacucaucccaccuucucaggguguugaaaugcaaaugcaaaaaggcugaaacccuguuucuuucuacucagugcccuaauauuauauacuaccuugaauugugcuucgucuuuuuaugcauguguccuguuagucuaauuagauuguaagcuccuugagggcagagacucuuucuccuuugucucugcagccuauaccuaguauagugccuugcacacaauaggugcucaauaaaugucuguuguugaucaugaccucuuaa

SEQ ID NO: 4 - RNA, 2090 nt, homo sapien
aguuguguagaucgcugagagacuacgaggguccgguucaguuuuaauucugucucuaaucucugcaacagccgcgcuucccgggucccgcggcucccgcgcgcgaucugccgcggccggcugcugggcaaaaaucagagccgccuccgccccauuacccaucauggaaacccuccaggaaaaaguggccccggacgcgcgagccugaggauucugcacaaaagaggugcccaaaaugaagacccugaugcgccauggucuggcaguguguuuagcgcucaccaccaugugcaccagcuuguugcuaguguacagcagccucggcggccagaaggagcggcccccgcagcagcagcagcagcagcagcaacagcagcagcaggcgucggccaccggcagcucgcagccggcggcggagagcagcacccagcagcgccccgggguccccgcgggaccgcggccacuggacggauaccucggaguggcggaccacaagccccugaaaaugcacugcagggacugugcccuggugaccagcucagggcaucugcugcacagucggcaaggcucccagauugaccagacagagugugucauccgcaugaaugacgcccccacacgcggcuaugggcgugacgugggcaaucgcaccagccugagggucaucgcgcauuccagcauccagaggauccuccgcaaccgccaugaccugcucaacgugagccagggcaccguguucaucuucuggggccccagcagcuacaugcggcgggacggcaagggccaggucuacaacaaccugcaucuccugagccaggugcugccccggcugaaggccuucaugauuacucgccacaagaugcugcaguuugaugagcucuucaagcaggagacuggcaaagacaggaagauauccaacacuuggcucagcacuggcugguuuacaaugacaauugcacuggagcucugugacaggaucaauguuuauggcauggugcccccagacuucugcagggaucccaaucacccuucaguaccuuaucauuauuaugaaccuuuuggaccugaugaauguacaauguaccucucccaugagcgaggacgcaagggcagucaucaccgcuuuaucacagagaaacgagucuuuaagaacugggcacggacauucaauauucacuuuuuucaaccagacuggaaaccagaaucacuugcuauaaaucauccugagaauaaaccuguguucuaaggaaugagcaugccagacuguaaucccagguauucacugcaucagacaccgagacacugaacuuccugagccaccagacaggaaaggguagcagaaaacagcuucacuccucaggaaguaccauggacagacgccuaccaggggugacaaagcagugcaguuggauuguaaggaaaaauuccggaauuaaugcauccuaaugaauguuguccccuucaaugguguuaccuuaggagcugaacauucaauucaguuacaccacuaugacuaaaaacaguuuggaucucuuaguauugccuuugaaacugcaacauaagcaacucaacaauauuaguugcauuccuuuauagacauaccaugucaaagacguuuuucuaucaaguuguauucuuuccuguucuauaaccuuugucaucuguuagacucuguaugugugauuuguaaaaagcaggcugaaacuauggacaugauuucugaagagcacaucuccacugacuuucauaaagcaaauguccaauauuuauuuauugagaguuuuuuagugcaaucugggccaguauuuuuauagauuaugauuaugugguaauuuauccuuccuaacucuuuaauccugaaugaugguuggaaauggccuagaauuagguuacucuguucacaaugcucauuguuagcaugcaauugguauuugacuuggaaguguuguguuguauuuuuugaaccccuaggcuucaggaaaacugcucuuuuguaaaaagaauagcgaugacauuuucuaaugugcagaaauguuccaaaaggacaaaauugaaaaccaaaaacuauguuauuaaaacaaaaaaaugcu

SEQ ID NO: 5 - RNA, 2017 nt, homo sapien
aguuuuaauucugucucuaaucucugcaacagccgcgcuucccgggucccgcggcucccgcgcgcgaucugccgcggccggcugcugggcaaaaaucagagccgccuccgccccauuacccaucauggaaacccuccaggaaaaaguggccccggacgcgcgagccugaggauucugcacaaaagaggugcccaaaaugaagacccugaugcgccauggucuggcaguguguuuagcgcucaccaccaugugcaccagcuuguugcuaguguacagcagccucggcggccagaaggagcggcccccgcagcagcagcagcagcucgcagccggcggcggagagcagcacccagcagcgccccgggguccccgcgggaccgcggccacuggacggauaccucggaguggcggaccacaagccccugaaaauguacugcagggacugugcccuggugaccagcucagggcaucugcugcacagucggcaaggcucccagauugaccagacagagugugucguccgcaugaaugacgcccccacacgcggcuaugggcgugacgugggcaaucgcaccagccugagggucaucgcgcauuccagcauccagaggauccuccgcaaccgccaugaccugcucaacgugagccagggcaccguguucaucuucuggggccccagcagcuacaugcggcgggacggcaagggccaggucuacaacaaccugcaucuccugagccaggugcugccccggcugaaggccuucaugauuacucgccacaagaugcugcaguuugaugagcucuucaagcaggagacuggcaaagacagauauccaacacuuggcucagcacuggcugguuuacaaugacaauugcacuggagcucugugacaggaucaauguuuauggcauggugcccccagacuucugcagggaucccaaucacccuucaguaccuuaucauuauuaugaaccuuuuggaccugaugaauguacaauguaccucucccaugagcgaggacgcaagggcagucaucaccgcuuuaucacagagaaacgagucuuuaagaacugggcacggacauucaauauucacuuuucucaaccagacuggaaaccagaaucacuugcuauaaaucauccugagaauaaaccuguguucuaaggaaugagcaugccagacuguaaucccagguauucacugcaucagacaccgagacacugaacuuccugagccaccagacaggaaaggguagcagaaaacagcuucacuccucaggaaguaccauggacagacgccuaccaggggugacaaagcagugcaguuggauuguaaggaaaaauuccggaauuaaugcauccuaaugaauguuguccccuucaaugguguuaccuuaggagcugaacauucaauucaguuacaccacuaugacuaaaaacaguuuggaucucuuaguauugccuuugaaacugcaacauaagcaacucaacaauauuaguugcauuccuuuauagacauaccaugucaaagacguuuuucuaucaaguuguauucuuuccuguucuauaaccuuugucaucuguuagacucuguaugugugauuuguaaaaagcaggcugaaacuauggacaugauuucugaagagcacaucuccacugacuuucauaaagcaaauguccaauauuuauuuauugagaguuuuuuagugcaaucugggccaguauuuuuauagauuaugauuaugugguaauuuauccuuccuaacucuuuaauccugaaugaugguuggaaauggccuagaauuagguuacucuguucacaaugcucauuguuagcaugcaauugguauuugacuuggaaguguuguguuguauuuuuugaaccccuaggcuucagggaaacugcucuuuuguaaaaagaauagcgaugacauuuucuaaugugcagaaauguuccaaaaggacaaaauugaaaaccaaaaacuauguuauuaaaacaaaaaaaugcuaacaagag

SEQ ID NO: 6 - RNA, 1291 nt, homo sapien
gucucuaaucucugcaacagccgcgcuucccgggucccgcggcucccgcgcgcgaucugccgcggccggcugcugggcaaaaaucagagccgccuccgccccauuacccaucauggaaacccuccaggaaaaaguggccccggacgcgcgagccugaggauucugcacaaaagaggugcccaaaaugaagacccugaugcgccauggucuggcaguguguuuagcgcucaccaccaugugcaccagcuuguugcuaguguacagcagccucggcggccagaaggagcggcggagagcagcacccagcagcgccccgggguccccgcgggaccgcggccacuggacggauaccucggaguggcggaccacaagccccugaaaaugcacugcagggacugugcccuggugaccagcucagggcaucugcugcacagucggcaaggcucccagauugaccagacagagugugucauccgcaugaaugacgcccccacacgcggcuaugggcgugacgugggcaaucgcaccagccugagggucaucgcgcauuccagcauccagaggauccuccgcaaccgccaugaccugcucaacgugagccagggcaccguguucaucuucuggggccccagcagcuacaugcggcgggacggcaagggccaggucuacaacaaccugcaucuccugagccaggugcugccccggcugaaggccuucaugauuacucgccacaagaugcugcaguuugaugagcucuucaagcaggagacuggcaaagacaggaagauauccaacacuuggcucagcacuggcugguuuacaaugacaauugcacuggagcucugugacaggaucaauguuuauggcauggugcccccagacuucugcagggaucccaaucacccuucaguaccuuaucauuauuaugaaccuuuuggaccugaugaauguacaauguaccucucccaugagcgaggacgcaagggcagucaucaccgcuuuaucacagagaaacgagucuuuaagaacugggcacggacauucaauauucacuuuuuucaaccagacuggaaaccagaaucacuugcuauaaaucauccugagaauaaaccuguguucuaaggaaugagcaugccagacuguaaucccagguauucacugcaucagacaccgagacacugaacuuccugagccaccagacaggaaaggguagcagaaaacagcuucacuccucaggaaguaccauggacagacgccuaccaggggugacaaagcagugcaguuggauugu

SEQ ID NO: 7 - RNA, 2048 nt, homo sapien
cucugcaacagccgcgcuucccgggucccgcggcucccgcgcgcgaucugccgcggccggcugcugggcaaaaaucagagccgccuccgccccauuacccaucauggaaacccuccaggaaaaaguggccccggacgcgcgagccugaggauucugcacaaaagaggugcccaaaaugaagacccugaugcgccauggucuggcaguguguuuagcgcucaccaccaugugcaccagcuuguugcuaguguacagcagccucggcggccagaaggagcggcccccgcagcagcagcagcagcagcagcaacagcagcagcaggcgucggccaccggcagcucgcagccggcggcggagagcagcacccagcagcgccccgggguccccgcgggaccgcggccacuggacggauaccucggaguggcggaccacaagccccugaaaaugcacugcagggacugugcccuggugaccagcucagggcaucugcugcacagucggcaaggcucccagauugaccagacagagugugucauccgcaugaaugacgcccccacacgcggcuaugggcgugacgugggcaaucgcaccagccugagggucaucgcgcauuccagcauccagaggauccuccgcaaccgccaugaccugcucaacgugagccagggcaccguguucaucuucuggggccccagcagcuacaugcggcgggacggcaagggccaggucuacaacaaccugcaucuccugagccaggugcugccccggcugaaggccuucaugauuacucgccacaagaugcugcaguuugaugagcucuucaagcaggagacuggcaaagacaggaagauauccaacacuuggcucagcacuggcugguuuacaaugacaauugcacuggagcucugugacaggaucaauguuuauggcauggugcccccagacuucugcagggaucccaaucacccuucaguaccuuaucauuauuaugaaccuuuuggaccugaugaauguacaauguaccucucccaugagcgaggacgcaagggcagucaucaccgcuuuaucacagagaaacgagucuuuaagaacugggcacggacauucaauauucacuuuuuucaaccagacuggaaaccagaaucacuugcuauaaaucauccugagaauaaaccuguguucuaaggaaugagcaugccagacuguaaucccagguauucacugcaucagacaccgagacacugaacuuccugagccaccagacaggaaaggguagcagaaaacagcuucacuccucaggaaguaccauggacagacgccuaccaggggugacaaagcagugcaguuggauuguaaggaaaaauuccggaauuaaugcauccuaaugaauguuguccccuucaaugguguuaccuuaggagcugaacauucaauucaguuacaccacuaugacuaaaaacaguuuggaucucuuaguauugccuuugaaacugcaacauaagcaacucaacaauauuaguugcauuccuuuauagacauaccaugucaaagacguuuuucuaucaaguuguauucuuuccuguucuauaaccuuugucaucuguuagacucuguaugugugauuuguaaaaagcaggcugaaacuauggacaugauuucugaagagcacaucuccacugacuuucauaaagcaaauguccaauauuuauuuauugagaguuuuuuagugcaaucugggccaguauuuuuauagauuaugauuaugugguaauuuauccuuccuaacucuuuaauccugaaugaugguuggaaauggccuagaauuagguuacucuguucacaaugcucauuguuagcaugcaauugguauuugacuuggaaguguuguguuguauuuuuugaaccccuaggcuucaggaaaacugcucuuuuguaaaaagaauagcgaugacauuuucuaaugugcagaaauguuccaaaaggacaaaauugaaaaccaaaaacuauguuauuaaaacaaaaaaaugcuaaaaaaaaaaaaaaaaaa

SEQ ID NO: 8 - RNA, 1041 nt, homo sapien
gaggugcccaaaaugaagacccugaugcgccauggucuggcaguguguuuagcgcucaccaccaugugcaccagcuuguugcuaguguacagcagccucggcggccagaaggagcggcccccgcagcagcagcagcagcagcagcaacagcagcagcaggcgucggccaccggcagcucgcagccggcggcggagagcagcacccagcagcgccccgggguccccgcgggaccgcggccacuggacggauaccucggaguggcggaccacaagccccugaaaaugcacugcagggacugugcccuggugaccagcucagggcaucugcugcacagucggcaaggcucccagauugaccagacagagugugucauccgcaugaaugacgcccccacacgcggcuaugggcgugacgugggcaaucgcaccagccugagggucaucgcgcauuccagcauccagaggauccuccgcaaccgccaugaccugcucaacgugagccagggcaccguguucaucuucuggggccccagcagcuacaugcggcgggacggcaagggccaggucuacaacaaccugcaucuccugagccaggugcugccccggcugaaggccuucaugauuacucgccacaagaugcugcaguuugaugagcucuucaagcaggagacuggcaaagacaggaagauauccaacacuuggcucagcacuggcugguuuacaaugacaauugcacuggagcucugugacaggaucaauguuuauggcauggugcccccagacuucugcagggaucccaaucacccuucaguaccuuaucauuauuaugaaccuuuuggaccugaugaauguacaauguaccucucccaugagcgaggacgcaagggcagucaucaccgcuuuaucacagagaaacgagucuuuaagaacugggcacggacauucaauauucacuuuuuucaaccagacuggaaaccagaaucacuugcuauaaaucauccugagaauaaaccuguguucuaaggaaugagcaugccagac

SEQ ID NO: 9 - RNA, 3751 nt, homo sapien
aguuguguagaucgcugagagacuacgaggguccgguucaguuuuaauucugucucuaaucucugcaacagccgcgcuucccgggucccgcggcucccgcgcgcgaucugccgcggccggcugcugggcaaaaaucagagccgccuccgccccauuacccaucauggaaacccuccaggaaaaaguggccccggacgcgcgagccugaggauucugcacaaaagaggugcccaaaaugaagacccugaugcgccauggucuggcaguguguuuagcgcucaccaccaugugcaccagcuuguugcuaguguacagcagccucggcggccagaaggagcggcccccgcagcagcagcagcagcagcagcaacagcagcagcaggcgucggccaccggcagcucgcagccggcggcggagagcagcacccagcagcgccccgggguccccgcgggaccgcggccacuggacggauaccucggaguggcggaccacaagccccugaaaaugcacugcagggacugugcccuggugaccagcucagggcaucugcugcacagucggcaaggcucccagauugaccagacagagugugucauccgcaugaaugacgcccccacacgcggcuaugggcgugacgugggcaaucgcaccagccugagggucaucgcgcauuccagcauccagaggauccuccgcaaccgccaugaccugcucaacgugagccagggcaccguguucaucuucuggggccccagcagcuacaugcggcgggacggcaagggccaggucuacaacaaccugcaucuccugagccaggugcugccccggcugaaggccuucaugauuacucgccacaagaugcugcaguuugaugagcucuucaagcaggagacuggcaaagacaggaagauauccaacacuuggcucagcacuggcugguuuacaaugacaauugcacuggagcucugugacaggaucaauguuuauggcauggugcccccagacuucugcagggaucccaaucacccuucaguaccuuaucauuauuaugaaccuuuuggaccugaugaauguacaauguaccucucccaugagcgaggacgcaagggcagucaucaccgcuuuaucacagagaaacgagucuuuaagaacugggcacggacauucaauauucacuuuuuucaaccagacuggaaaccagaaucacuugcuauaaaucauccugagaauaaaccuguguucuaaggaaugagcaugccagacuguaaucccagguauucacugcaucagacaccgagacacugaacuuccugagccaccagacaggaaaggguagcagaaaacagcuucacuccucaggaaguaccauggacagacgccuaccaggggugacaaagcagugcaguuggauuguaaggaaaaauuccggaauuaaugcauccuaaugaauguuguccccuucaaugguguuaccuuaggagcugaacauucaauucaguuacaccacuaugacuaaaaacaguuuggaucucuuaguauugccuuugaaacugcaacauaagcaacucaacaauauuaguugcauuccuuuauagacauaccaugucaaagacguuuuucuaucaaguuguauucuuuccuguucuauaaccuuugucaucuguuagacucuguaugugugauuuguaaaaagcaggcugaaacuauggacaugauuucugaagagcacaucuccacugacuuucauaaagcaaauguccaauauuuauuuauugagaguuuuuuagugcaaucugggccaguauuuuuauagauuaugauuaugugguaauuuauccuuccuaacucuuuaauccugaaugaugguuggaaauggccuagaauuagguuacucuguucacaaugcucauuguuagcaugcaauugguauuugacuuggaaguguuguguuguauuuuuugaaccccuaggcuucaggaaaacugcucuuuuguaaaaagaauagcgaugacauuuucuaaugugcagaaauguuccaaaaggacaaaauugaaaaccaaaaacuauguuauuaaaacaaaaaaaugcuaacaagagaaauuuaaagguaguuuucuuuaguaauaauuuauguaaguguccucucuugagcccuaguuuccuuuuuggcagaaugaugucacuguaccagacaaccucuuagguuucaucccaaaucuaaacuuguggccucuucuugacccauuugaagacucugcacuuggagugauggggccccaacaguagcaggaacuuuauuuuggggagccuuaucuacauucauauuacuuauaucacucuugugguuaaaacuacacuucuuccuguguccacaugggcuaaaaucuacccccugcuucucucgaagcaucaccauccgccucuuccccagccucucaacacaaaaacacaggauacacacacacacacacacacaaaagacauagcuccaagggguucccuggcuacaauagcaaacagcugcccuucugugaggaaaagagacuacaaggacaugcccuaucauucaacucauuuaugcuaugaacuguuuagacucacuacaaaucuucuuagauuauauucauuaccauucccuggucugaaggaguauaaaggacuuauuuuauucagagccaagauaaauucauauuauagauuuuuauuuaaacaaguaauauuguucaaaaauagucucuuauaaauauacuaguguuuucuuuacacaugacuuagaaggcauuaguuucucuaaugccaaauuugaaggcaccagcaaauauuauguaugaagacugacauuguuuuacagacaugaccuggcuuaugauaaaagaaguuuuaucgcauuaccacuucuuuucccuuuucuuaauuaguacacuaacuaguacuauuaauuacacggaguauuguuguuaaaaugcaaacacaaucaggguacucacauaacauaaacaaaguugauauugauguguauggcuugggcuguucaaagccaguaagauugaaauggccguccaaaacauacuggaauauguucuuuaaguuuucucauaguuuuuaaagggacuaugaauuuuauuccaacacauugucuuccacagcauggacucugaacacaucauacuuuaucaacauaugaaaaaguguauuaauuuuauacaauuuacuuauaggccaccuuuauaaucacuugaagacguuauguugcucaaacauaaguggcuccuuuggcaauuucuauauuuguggaaauuuggaaaggcauaguuucaacaugcaagaauguaauuauauugcuucaucuaauaauaucucacauaucugucuaucuucagauuuuagauuuucuuuauuaaaaaaaccaucaugguagcuccaucucguuuguaacuucucccucucaaauacucagaagaaugaagaggccaaauucagaaaaucauggcuucacugggaaauguuuuaaaucuacauguagcuaggauaugugauuucauauuuuuuaaaaaugugguguaaauaaguguaaaaaauuaccacuugcaaagugguuuuauuacagcguuaaagaaaaugacuagaauucugauagauugugcugaugaaccugguugugggcaauugaauucuugucuucccacuaccauuucaugacugucgucugaacacuauucaacaccauuaaauauaaacucugauauaaaa

SEQ ID NO: 10 - RNA, 2055 nt, homo sapien
aguuuuaauucugucucuaaucucugcaacagccgcgcuucccgggucccgcggcucccgcgcgcgaucugccgcggccggcugcugggcaaaaaucagagccgccuccgccccauuacccaucauggaaacccuccaggaaaaaguggccccggacgcgcgagccugaggauucugcacaaaagaggugcccaaaaugaagacccugaugcgccauggucuggcaguguguuuagcgcucaccaccaugugcaccagcuuguugcuaguguacagcagccucggcggccagaaggagcggcccccgcagcagcagcagcagcagcagcaacagcagcagcaggcgucggccaccggcagcucgcagccggcggcggagagcagcacccagcagcgccccgggguccccgcgggaccgcggccacuggacggauaccucggaguggcggaccacaagccccugaaaaugcacugcagggacugugcccuggugaccagcucagggcaucugcugcacagucggcaaggcucccagauugaccagacagagugugucauccgcaugaaugacgcccccacacgcggcuaugggcgugacgugggcaaucgcaccagccugagggucaucgcgcauuccagcauccagaggauccuccgcaaccgccaugaccugcucaacgugagccagggcaccguguucaucuucuggggccccagcagcuacaugcggcgggacggcaagggccaggucuacaacaaccugcaucuccugagccaggugcugccccggcugaaggccuucaugauuacucgccacaagaugcugcaguuugaugagcucuucaagcaggagacuggcaaagacagauauccaacacuuggcucagcacuggcugguuuacaaugacaauugcacuggagcucugugacaggaucaauguuuauggcauggugcccccagacuucugcagggaucccaaucacccuucaguaccuuaucauuauuaugaaccuuuuggaccugaugaauguacaauguaccucucccaugagcgaggacgcaagggcagucaucaccgcuuuaucacagagaaacgagucuuuaagaacugggcacggacauucaauauucacuuuuuucaaccagacuggaaaccagaaucacuugcuauaaaucauccugagaauaaaccuguguucuaaggaaugagcaugccagacuguaaucccagguauucacugcaucagacaccgagacacugaacuuccugagccaccagacaggaaaggguagcagaaaacagcuucacuccucaggaaguaccauggacagacgccuaccaggggugacaaagcagugcaguuggauuguaaggaaaaauuccggaauuaaugcauccuaaugaauguuguccccuucaaugguguuaccuuaggagcugaacauucaauucaguuacaccacuaugacuaaaaacaguuuggaucucuuaguauugccuuugaaacugcaacauaagcaacucaacaauauuaguugcauuccuuuauagacauaccaugucaaagacguuuuucuaucaaguuguauucuuuccuguucuauaaccuuugucaucuguuagacucuguaugugugauuuguaaaaagcaggcugaaacuauggacaugauuucugaagagcacaucuccacugacuuucauaaagcaaauguccaauauuuauuuauugagaguuuuuuagugcaaucugggccaguauuuuuauagauuaugauuaugugguaauuuauccuuccuaacucuuuaauccugaaugaugguuggaaauggccuagaauuagguuacucuguucacaaugcucauuguuagcaugcaauugguauuugacuuggaaguguuguguuguauuuuuugaaccccuaggcuucaggaaaacugcucuuuuguaaaaagaauagcgaugacauuuucuaaugugcagaaauguuccaaaaggacaaaauugaaaaccaaaaacuauguuauuaaaacaaaaaaaugcuaacaagag

SEQ ID NO: 11 - RNA, 5547 nt, homo sapien
aguuuuaauucugucucuaaucucugcaacagccgcgcuucccgggucccgcggcucccgcgcgcgaucugccgcggccggcugcugggcaaaaaucagagccgccuccgccccauuacccaucauggaaacccuccaggaaaaaguggccccggacgcgcgagccugaggauucugcacaaaagaggugcccaaaaugaagacccugaugcgccauggucuggcaguguguuuagcgcucaccaccaugugcaccagcuuguugcuaguguacagcagccucggcggccagaaggagcggcccccgcagcagcagcagcagcagcagcaacagcagcagcaggcgucggccaccggcagcucgcagccggcggcggagagcagcacccagcagcgccccgggguccccgcgggaccgcggccacuggacggauaccucggaguggcggaccacaagccccugaaaaugcacugcagggacugugcccuggugaccagcucagggcaucugcugcacagucggcaaggcucccagauugaccagacagagugugucauccgcaugaaugacgcccccacacgcggcuaugggcgugacgcgggcaaucgcaccagccugagggucaucgcgcauuccagcauccagaggauccuccgcaaccgccaugaccugcucaacgugagccagggcaccguguucaucuucuggggccccagcagcuacaugcggcgggacggcaagggccaggucuacaacaaccugcaucuccugagccaggugcugccccggcugaaggccuucaugauuacucgccacaagaugcugcaguuugaugagcucuucaagcaggagacuggcaaagacaggaagauauccaacacuuggcucagcacuggcugguuuacaaugacaauugcacuggagcucugugacaggaucaauguuuauggcauggugcccccagacuucugcagggaucccaaucacccuucaguaccuuaucauuauuaugaaccuuuuggaccugaugaauguacaauguaccucucccaugagcgaggacgcaagggcagucaucaccgcuuuaucacagagaaacgagucuuuaagaacugggcacggacauucaauauucacuuuuuucaaccagacuggaaaccagaaucacuugcuauaaaucauccugagaauaaaccuguguucuaaggaaugagcaugccagacuguaaucccagguauucacugcaucagacaccgagacacugaacuuccugagccaccagacaggaaaggguagcagaaaacagcuucacuccucaggaaguaccauggacagacgccuaccaggggugacaaagcagugcaguuggauuguaaggaaaaauuccggaauuaaugcauccuaaugaauguuguccccuucaaugguguuaccuuaggagcugaacauucaauucaguuacaccacuaugacuaaaaacaguuuggaucucuuaguauugccuuugaaacugcaacauaagcaacucaacaauauuaguugcauuccuuuauagacauaccaugucaaagacguuuuucuaucaaguuguauucuuuccuguucuauaaccuuugucaucuguuagacucuguaugugugauuuguaaaaagcaggcugaaacuauggacaugauuucugaagagcacaucuccacugacuuucauaaagcaaauguccaauauuuauuuauugagaguuuuuuagugcaaucugggccaguauuuuuauagauuaugauuaugugguaauuuauccuuccuaacucuuuaauccugaaugaugguuggaaauggccuagaauuagguuacucuguucacaaugcucauuguuagcaugcaauugguauuugacuuggaaguguuguguuguauuuuuugaaccccuaggcuucaggaaaacugcucuuuuguaaaaagaauagcgaugacauuuucuaaugugcagaaauguuccaaaaggacaaaauugaaaaccaaaaacuauguuauuaaaacaaaaaaaugcuaacaagagaaauuuaaagguaguuuucuuuaguaauaauuuauguaaguguccucucuugagcccuaguuuccuuuuuggcagaaugaugucacuguaccagacaaccucuuagguuucaucccaaaucuaaacuuguggccucuucuugacccauuugaagacucugcacuuggagugauggggccccaacaguagcaggaacuuuauuuuggggagccuuaucuacauucauauuacuuauaucacucuugugguuaaaacuacacuucuuccuguguccacaugggcuaaaaucuacccccugcuucucucgaagcaucaccauccgccucuuccccagccucucaacacaaaaacacaggauacacacacacacacacacacaaaagacauagcuccaagggguucccuggcuacaauagcaaacagcugcccuucugugaggaaaagagacuacaaggacaugcccuaucauucaacucauuuaugcuaugaacuguuuagacucacuacaaaucuucuuagauuauauucauuaccauucccuggucugaaggaguauaaaggacuuauuuuauucagagccaagauaaauucauauuauagauuuuuauuuaaacaaguaauauuguucaaaaauagucucuuauaaauauacuaguguuuucuuuacacaugacuuagaaggcauuaguuucucuaaugccaaauuugaaggcaccagcaaauauuauguaugaagacugacauuguuuuacagacaugaccuggcuuaugauaaaagaaguuuuaucgcauuaccacuucuuuucccuuuucuuaauuaguacacuaacuaguacuauuaauuacacggaguauuguuguuaaaaugcaaacacaaucaggguacucacauaacauaaacaaaguugauauugauguguauggcuugggcuguucaaagccaguaagauugaaauggccguccaaaacauacuggaauauguucuuuaaguuuucucauaguuuuuaaagggacuaugaauuuuauuccaacacauugucuuccacagcauggacucugaacacaucauacuuuaucaacauaugaaaaaguguauuaauuuuauacaauuuacuuauaggccaccuuuauaaucacuugaagacguuauguugcucaaacauaaguggcuccuuuggcaauuucuauauuuguggaaauuuggaaaggcauaguuucaacaugcaagaauguaauuauauugcuucaucuaauaauaucucacauaucugucuaucuucagauuuuagauuuucuuuauuaaaaaaaccaucaugguagcuccaucucguuuguaacuucucccucucaaauacucagaagaaugaagaggccaaauucagaaaaucauggcuucacugggaaauguuuuaaaucuacauguagcuaggauaugugauuucauauuuuuuaaaaaugugguguaaauaaguguaaaaaauuaccacuugcaaagugguuuuauuacagcguuaaagaaaaugacuagaauucugauagauugugcugaugaaccugguugugggcaauugaauucuugucuucccacuaccauuucaugacugucgucugaacacuauucaacaccauuaaauauaaacucugauauaaaagaugacuacagaaccauguuuauagaccucggugauuucaguaucugauuguguuugaugccuaagucauacucguuauguuacaugccuuuuuccucucucccagcugugucaucagcucccuccuagcuuuuaagaccacaguaauacaaugccacagcuggucgauccauggcuucuguuauuucaacacaagaacauuuggcagaggccauuacaauagauagccauuaugggcaaagauacgggaauuugcaaacaaaaucaaucacuucaaauggcccauaaaaggaggaaucucagauuuaauauucuacgguaaauauucacccaagaaagcauacauuaaaagaacauuaggagguaaauauucagcaugcugcauggagacuuagcugugugauuuccauuaccguuaaugggcauuuggcaacuaagucccugugcuuugcuaacccugguguguacuccuaagggcuacacauaaaaccugagcaauucagagacuucugaggucaucagauuucagaguaagaucuuuucuuuaaaaaaaaaaauagaugaaagcaaaacacaacguauuguaccuaaaagagaaauuuguguggucucucacaauccuuagguuacuaccagauuuguguauccuuuguuuucugaaguucucuccauuacugaucuauuugaaugacaugagaauggagggaaauaaucucauuuugaaauaaaaacuccccucaaaaauuaaaauuaccgacuuagaagaugauaaaugcuaaguaaaaguagaaggagaaaguugaaauucuauuaggauuaagacaguguuauuuaaaggcacaugcacccauuuaguaccugccuaaauauuugcccuuguguaagagcaaacucauuucagaaauauauccugaauuccaccagggugaugguucaaauuguuaaauaaaccuacucugaaagaaggguccauguuccuauucucucucugcaguguugggaggugauguuaacacucuacauguuuuguaucugacccaaucauuucuuccauucucauugcuucucucuuaaaccucauuguaucucuuuacugucauuuucucccaauugucuucuuuugucuacagugugcuccuaaaccagcagucuuuggugcuguuaaggucuuccuuguagguuuuuaaacuaaagaucuaucugggaaacagauuugggguagguccugccagaguaaugaccaugguaggugggaggaauauaucuggcuaccauacaagguacuucagaaguaccauuaugguuugcccagggccaaguggggagugaagaagagggguccccaagacacagacuucagugcuaaaaccagggaaguccugggcuccaugacaguggcucacccuaucagaaggccacgucaaagagaacuauaauaauaagcccuggggggcaggaugugugaaccaauugccuagguguuagcacaugccagaagguacuuuggaauggaaagaggugagagugucucaagguuuaaaaaugagcaaguguagccccucuuuuguagcucacucaucccaccuucucaggguguugaaaugcaaaugcaaaaaggcugaaacccuguuucuuucuacucagugcccuaauauuauauacuaccuugaauugugcuucgucuuuuuaugcauguguccuguuagucuaauuagauuguaagcuccuugagggcagagacucuuucuccuuugucucugcagccuauaccuaguauagugccuugcacacaauaggugcucaauaaaugucuguuguugaucaugaccucuuaa

SEQ ID NO: 12 - RNA, 2090 nt, homo sapien
aguuguguagaucgcugagagacuacgaggguccgguucaguuuuaauucugucucuaaucucugcaacagccgcgcuucccgggucccgcggcucccgcgcgcgaucugccgcggccggcugcugggcaaaaaucagagccgccuccgccccauuacccaucauggaaacccuccaggaaaaaguggccccggacgcgcgagccugaggauucugcacaaaagaggugcccaaaaugaagacccugaugcgccauggucuggcaguguguuuagcgcucaccaccaugugcaccagcuuguugcuaguguacagcagccucggcggccagaaggagcggcccccgcagcagcagcagcagcagcagcaacagcagcagcaggcgucggccaccggcagcucgcagccggcggcggagagcagcacccagcagcgccccgggguccccgcgggaccgcggccacuggacggauaccucggaguggcggaccacaagccccugaaaaugcacugcagggacugugcccuggugaccagcucagggcaucugcugcacagucggcaaggcucccagauugaccagacagagugugucauccgcaugaaugacgcccccacacgcggcuaugggcgugacgcgggcaaucgcaccagccugagggucaucgcgcauuccagcauccagaggauccuccgcaaccgccaugaccugcucaacgugagccagggcaccguguucaucuucuggggccccagcagcuacaugcggcgggacggcaagggccaggucuacaacaaccugcaucuccugagccaggugcugccccggcugaaggccuucaugauuacucgccacaagaugcugcaguuugaugagcucuucaagcaggagacuggcaaagacaggaagauauccaacacuuggcucagcacuggcugguuuacaaugacaauugcacuggagcucugugacaggaucaauguuuauggcauggugcccccagacuucugcagggaucccaaucacccuucaguaccuuaucauuauuaugaaccuuuuggaccugaugaauguacaauguaccucucccaugagcgaggacgcaagggcagucaucaccgcuuuaucacagagaaacgagucuuuaagaacugggcacggacauucaauauucacuuuuuucaaccagacuggaaaccagaaucacuugcuauaaaucauccugagaauaaaccuguguucuaaggaaugagcaugccagacuguaaucccagguauucacugcaucagacaccgagacacugaacuuccugagccaccagacaggaaaggguagcagaaaacagcuucacuccucaggaaguaccauggacagacgccuaccaggggugacaaagcagugcaguuggauuguaaggaaaaauuccggaauuaaugcauccuaaugaauguuguccccuucaaugguguuaccuuaggagcugaacauucaauucaguuacaccacuaugacuaaaaacaguuuggaucucuuaguauugccuuugaaacugcaacauaagcaacucaacaauauuaguugcauuccuuuauagacauaccaugucaaagacguuuuucuaucaaguuguauucuuuccuguucuauaaccuuugucaucuguuagacucuguaugugugauuuguaaaaagcaggcugaaacuauggacaugauuucugaagagcacaucuccacugacuuucauaaagcaaauguccaauauuuauuuauugagaguuuuuuagugcaaucugggccaguauuuuuauagauuaugauuaugugguaauuuauccuuccuaacucuuuaauccugaaugaugguuggaaauggccuagaauuagguuacucuguucacaaugcucauuguuagcaugcaauugguauuugacuuggaaguguuguguuguauuuuuugaaccccuaggcuucaggaaaacugcucuuuuguaaaaagaauagcgaugacauuuucuaaugugcagaaauguuccaaaaggacaaaauugaaaaccaaaaacuauguuauuaaaacaaaaaaaugcu

SEQ ID NO: 13 - RNA, 2017 nt, homo sapien
aguuuuaauucugucucuaaucucugcaacagccgcgcuucccgggucccgcggcucccgcgcgcgaucugccgcggccggcugcugggcaaaaaucagagccgccuccgccccauuacccaucauggaaacccuccaggaaaaaguggccccggacgcgcgagccugaggauucugcacaaaagaggugcccaaaaugaagacccugaugcgccauggucuggcaguguguuuagcgcucaccaccaugugcaccagcuuguugcuaguguacagcagccucggcggccagaaggagcggcccccgcagcagcagcagcagcucgcagccggcggcggagagcagcacccagcagcgccccgggguccccgcgggaccgcggccacuggacggauaccucggaguggcggaccacaagccccugaaaauguacugcagggacugugcccuggugaccagcucagggcaucugcugcacagucggcaaggcucccagauugaccagacagagugugucguccgcaugaaugacgcccccacacgcggcuaugggcgugacgcgggcaaucgcaccagccugagggucaucgcgcauuccagcauccagaggauccuccgcaaccgccaugaccugcucaacgugagccagggcaccguguucaucuucuggggccccagcagcuacaugcggcgggacggcaagggccaggucuacaacaaccugcaucuccugagccaggugcugccccggcugaaggccuucaugauuacucgccacaagaugcugcaguuugaugagcucuucaagcaggagacuggcaaagacagauauccaacacuuggcucagcacuggcugguuuacaaugacaauugcacuggagcucugugacaggaucaauguuuauggcauggugcccccagacuucugcagggaucccaaucacccuucaguaccuuaucauuauuaugaaccuuuuggaccugaugaauguacaauguaccucucccaugagcgaggacgcaagggcagucaucaccgcuuuaucacagagaaacgagucuuuaagaacugggcacggacauucaauauucacuuuucucaaccagacuggaaaccagaaucacuugcuauaaaucauccugagaauaaaccuguguucuaaggaaugagcaugccagacuguaaucccagguauucacugcaucagacaccgagacacugaacuuccugagccaccagacaggaaaggguagcagaaaacagcuucacuccucaggaaguaccauggacagacgccuaccaggggugacaaagcagugcaguuggauuguaaggaaaaauuccggaauuaaugcauccuaaugaauguuguccccuucaaugguguuaccuuaggagcugaacauucaauucaguuacaccacuaugacuaaaaacaguuuggaucucuuaguauugccuuugaaacugcaacauaagcaacucaacaauauuaguugcauuccuuuauagacauaccaugucaaagacguuuuucuaucaaguuguauucuuuccuguucuauaaccuuugucaucuguuagacucuguaugugugauuuguaaaaagcaggcugaaacuauggacaugauuucugaagagcacaucuccacugacuuucauaaagcaaauguccaauauuuauuuauugagaguuuuuuagugcaaucugggccaguauuuuuauagauuaugauuaugugguaauuuauccuuccuaacucuuuaauccugaaugaugguuggaaauggccuagaauuagguuacucuguucacaaugcucauuguuagcaugcaauugguauuugacuuggaaguguuguguuguauuuuuugaaccccuaggcuucagggaaacugcucuuuuguaaaaagaauagcgaugacauuuucuaaugugcagaaauguuccaaaaggacaaaauugaaaaccaaaaacuauguuauuaaaacaaaaaaaugcuaacaagag

SEQ ID NO: 14 - RNA, 1291 nt, homo sapien
gucucuaaucucugcaacagccgcgcuucccgggucccgcggcucccgcgcgcgaucugccgcggccggcugcugggcaaaaaucagagccgccuccgccccauuacccaucauggaaacccuccaggaaaaaguggccccggacgcgcgagccugaggauucugcacaaaagaggugcccaaaaugaagacccugaugcgccauggucuggcaguguguuuagcgcucaccaccaugugcaccagcuuguugcuaguguacagcagccucggcggccagaaggagcggcggagagcagcacccagcagcgccccgggguccccgcgggaccgcggccacuggacggauaccucggaguggcggaccacaagccccugaaaaugcacugcagggacugugcccuggugaccagcucagggcaucugcugcacagucggcaaggcucccagauugaccagacagagugugucauccgcaugaaugacgcccccacacgcggcuaugggcgugacgcgggcaaucgcaccagccugagggucaucgcgcauuccagcauccagaggauccuccgcaaccgccaugaccugcucaacgugagccagggcaccguguucaucuucuggggccccagcagcuacaugcggcgggacggcaagggccaggucuacaacaaccugcaucuccugagccaggugcugccccggcugaaggccuucaugauuacucgccacaagaugcugcaguuugaugagcucuucaagcaggagacuggcaaagacaggaagauauccaacacuuggcucagcacuggcugguuuacaaugacaauugcacuggagcucugugacaggaucaauguuuauggcauggugcccccagacuucugcagggaucccaaucacccuucaguaccuuaucauuauuaugaaccuuuuggaccugaugaauguacaauguaccucucccaugagcgaggacgcaagggcagucaucaccgcuuuaucacagagaaacgagucuuuaagaacugggcacggacauucaauauucacuuuuuucaaccagacuggaaaccagaaucacuugcuauaaaucauccugagaauaaaccuguguucuaaggaaugagcaugccagacuguaaucccagguauucacugcaucagacaccgagacacugaacuuccugagccaccagacaggaaaggguagcagaaaacagcuucacuccucaggaaguaccauggacagacgccuaccaggggugacaaagcagugcaguuggauugu

SEQ ID NO: 15 - RNA, 2048 nt, homo sapien
cucugcaacagccgcgcuucccgggucccgcggcucccgcgcgcgaucugccgcggccggcugcugggcaaaaaucagagccgccuccgccccauuacccaucauggaaacccuccaggaaaaaguggccccggacgcgcgagccugaggauucugcacaaaagaggugcccaaaaugaagacccugaugcgccauggucuggcaguguguuuagcgcucaccaccaugugcaccagcuuguugcuaguguacagcagccucggcggccagaaggagcggcccccgcagcagcagcagcagcagcagcaacagcagcagcaggcgucggccaccggcagcucgcagccggcggcggagagcagcacccagcagcgccccgggguccccgcgggaccgcggccacuggacggauaccucggaguggcggaccacaagccccugaaaaugcacugcagggacugugcccuggugaccagcucagggcaucugcugcacagucggcaaggcucccagauugaccagacagagugugucauccgcaugaaugacgcccccacacgcggcuaugggcgugacgcgggcaaucgcaccagccugagggucaucgcgcauuccagcauccagaggauccuccgcaaccgccaugaccugcucaacgugagccagggcaccguguucaucuucuggggccccagcagcuacaugcggcgggacggcaagggccaggucuacaacaaccugcaucuccugagccaggugcugccccggcugaaggccuucaugauuacucgccacaagaugcugcaguuugaugagcucuucaagcaggagacuggcaaagacaggaagauauccaacacuuggcucagcacuggcugguuuacaaugacaauugcacuggagcucugugacaggaucaauguuuauggcauggugcccccagacuucugcagggaucccaaucacccuucaguaccuuaucauuauuaugaaccuuuuggaccugaugaauguacaauguaccucucccaugagcgaggacgcaagggcagucaucaccgcuuuaucacagagaaacgagucuuuaagaacugggcacggacauucaauauucacuuuuuucaaccagacuggaaaccagaaucacuugcuauaaaucauccugagaauaaaccuguguucuaaggaaugagcaugccagacuguaaucccagguauucacugcaucagacaccgagacacugaacuuccugagccaccagacaggaaaggguagcagaaaacagcuucacuccucaggaaguaccauggacagacgccuaccaggggugacaaagcagugcaguuggauuguaaggaaaaauuccggaauuaaugcauccuaaugaauguuguccccuucaaugguguuaccuuaggagcugaacauucaauucaguuacaccacuaugacuaaaaacaguuuggaucucuuaguauugccuuugaaacugcaacauaagcaacucaacaauauuaguugcauuccuuuauagacauaccaugucaaagacguuuuucuaucaaguuguauucuuuccuguucuauaaccuuugucaucuguuagacucuguaugugugauuuguaaaaagcaggcugaaacuauggacaugauuucugaagagcacaucuccacugacuuucauaaagcaaauguccaauauuuauuuauugagaguuuuuuagugcaaucugggccaguauuuuuauagauuaugauuaugugguaauuuauccuuccuaacucuuuaauccugaaugaugguuggaaauggccuagaauuagguuacucuguucacaaugcucauuguuagcaugcaauugguauuugacuuggaaguguuguguuguauuuuuugaaccccuaggcuucaggaaaacugcucuuuuguaaaaagaauagcgaugacauuuucuaaugugcagaaauguuccaaaaggacaaaauugaaaaccaaaaacuauguuauuaaaacaaaaaaaugcuaaaaaaaaaaaaaaaaaa

SEQ ID NO: 16 - RNA, 1041 nt, homo sapien
gaggugcccaaaaugaagacccugaugcgccauggucuggcaguguguuuagcgcucaccaccaugugcaccagcuuguugcuaguguacagcagccucggcggccagaaggagcggcccccgcagcagcagcagcagcagcagcaacagcagcagcaggcgucggccaccggcagcucgcagccggcggcggagagcagcacccagcagcgccccgggguccccgcgggaccgcggccacuggacggauaccucggaguggcggaccacaagccccugaaaaugcacugcagggacugugcccuggugaccagcucagggcaucugcugcacagucggcaaggcucccagauugaccagacagagugugucauccgcaugaaugacgcccccacacgcggcuaugggcgugacgcgggcaaucgcaccagccugagggucaucgcgcauuccagcauccagaggauccuccgcaaccgccaugaccugcucaacgugagccagggcaccguguucaucuucuggggccccagcagcuacaugcggcgggacggcaagggccaggucuacaacaaccugcaucuccugagccaggugcugccccggcugaaggccuucaugauuacucgccacaagaugcugcaguuugaugagcucuucaagcaggagacuggcaaagacaggaagauauccaacacuuggcucagcacuggcugguuuacaaugacaauugcacuggagcucugugacaggaucaauguuuauggcauggugcccccagacuucugcagggaucccaaucacccuucaguaccuuaucauuauuaugaaccuuuuggaccugaugaauguacaauguaccucucccaugagcgaggacgcaagggcagucaucaccgcuuuaucacagagaaacgagucuuuaagaacugggcacggacauucaauauucacuuuuuucaaccagacuggaaaccagaaucacuugcuauaaaucauccugagaauaaaccuguguucuaaggaaugagcaugccagac

SEQ ID NO: 17 - RNA, 3751 nt, homo sapien
aguuguguagaucgcugagagacuacgaggguccgguucaguuuuaauucugucucuaaucucugcaacagccgcgcuucccgggucccgcggcucccgcgcgcgaucugccgcggccggcugcugggcaaaaaucagagccgccuccgccccauuacccaucauggaaacccuccaggaaaaaguggccccggacgcgcgagccugaggauucugcacaaaagaggugcccaaaaugaagacccugaugcgccauggucuggcaguguguuuagcgcucaccaccaugugcaccagcuuguugcuaguguacagcagccucggcggccagaaggagcggcccccgcagcagcagcagcagcagcagcaacagcagcagcaggcgucggccaccggcagcucgcagccggcggcggagagcagcacccagcagcgccccgggguccccgcgggaccgcggccacuggacggauaccucggaguggcggaccacaagccccugaaaaugcacugcagggacugugcccuggugaccagcucagggcaucugcugcacagucggcaaggcucccagauugaccagacagagugugucauccgcaugaaugacgcccccacacgcggcuaugggcgugacgcgggcaaucgcaccagccugagggucaucgcgcauuccagcauccagaggauccuccgcaaccgccaugaccugcucaacgugagccagggcaccguguucaucuucuggggccccagcagcuacaugcggcgggacggcaagggccaggucuacaacaaccugcaucuccugagccaggugcugccccggcugaaggccuucaugauuacucgccacaagaugcugcaguuugaugagcucuucaagcaggagacuggcaaagacaggaagauauccaacacuuggcucagcacuggcugguuuacaaugacaauugcacuggagcucugugacaggaucaauguuuauggcauggugcccccagacuucugcagggaucccaaucacccuucaguaccuuaucauuauuaugaaccuuuuggaccugaugaauguacaauguaccucucccaugagcgaggacgcaagggcagucaucaccgcuuuaucacagagaaacgagucuuuaagaacugggcacggacauucaauauucacuuuuuucaaccagacuggaaaccagaaucacuugcuauaaaucauccugagaauaaaccuguguucuaaggaaugagcaugccagacuguaaucccagguauucacugcaucagacaccgagacacugaacuuccugagccaccagacaggaaaggguagcagaaaacagcuucacuccucaggaaguaccauggacagacgccuaccaggggugacaaagcagugcaguuggauuguaaggaaaaauuccggaauuaaugcauccuaaugaauguuguccccuucaaugguguuaccuuaggagcugaacauucaauucaguuacaccacuaugacuaaaaacaguuuggaucucuuaguauugccuuugaaacugcaacauaagcaacucaacaauauuaguugcauuccuuuauagacauaccaugucaaagacguuuuucuaucaaguuguauucuuuccuguucuauaaccuuugucaucuguuagacucuguaugugugauuuguaaaaagcaggcugaaacuauggacaugauuucugaagagcacaucuccacugacuuucauaaagcaaauguccaauauuuauuuauugagaguuuuuuagugcaaucugggccaguauuuuuauagauuaugauuaugugguaauuuauccuuccuaacucuuuaauccugaaugaugguuggaaauggccuagaauuagguuacucuguucacaaugcucauuguuagcaugcaauugguauuugacuuggaaguguuguguuguauuuuuugaaccccuaggcuucaggaaaacugcucuuuuguaaaaagaauagcgaugacauuuucuaaugugcagaaauguuccaaaaggacaaaauugaaaaccaaaaacuauguuauuaaaacaaaaaaaugcuaacaagagaaauuuaaagguaguuuucuuuaguaauaauuuauguaaguguccucucuugagcccuaguuuccuuuuuggcagaaugaugucacuguaccagacaaccucuuagguuucaucccaaaucuaaacuuguggccucuucuugacccauuugaagacucugcacuuggagugauggggccccaacaguagcaggaacuuuauuuuggggagccuuaucuacauucauauuacuuauaucacucuugugguuaaaacuacacuucuuccuguguccacaugggcuaaaaucuacccccugcuucucucgaagcaucaccauccgccucuuccccagccucucaacacaaaaacacaggauacacacacacacacacacacaaaagacauagcuccaagggguucccuggcuacaauagcaaacagcugcccuucugugaggaaaagagacuacaaggacaugcccuaucauucaacucauuuaugcuaugaacuguuuagacucacuacaaaucuucuuagauuauauucauuaccauucccuggucugaaggaguauaaaggacuuauuuuauucagagccaagauaaauucauauuauagauuuuuauuuaaacaaguaauauuguucaaaaauagucucuuauaaauauacuaguguuuucuuuacacaugacuuagaaggcauuaguuucucuaaugccaaauuugaaggcaccagcaaauauuauguaugaagacugacauuguuuuacagacaugaccuggcuuaugauaaaagaaguuuuaucgcauuaccacuucuuuucccuuuucuuaauuaguacacuaacuaguacuauuaauuacacggaguauuguuguuaaaaugcaaacacaaucaggguacucacauaacauaaacaaaguugauauugauguguauggcuugggcuguucaaagccaguaagauugaaauggccguccaaaacauacuggaauauguucuuuaaguuuucucauaguuuuuaaagggacuaugaauuuuauuccaacacauugucuuccacagcauggacucugaacacaucauacuuuaucaacauaugaaaaaguguauuaauuuuauacaauuuacuuauaggccaccuuuauaaucacuugaagacguuauguugcucaaacauaaguggcuccuuuggcaauuucuauauuuguggaaauuuggaaaggcauaguuucaacaugcaagaauguaauuauauugcuucaucuaauaauaucucacauaucugucuaucuucagauuuuagauuuucuuuauuaaaaaaaccaucaugguagcuccaucucguuuguaacuucucccucucaaauacucagaagaaugaagaggccaaauucagaaaaucauggcuucacugggaaauguuuuaaaucuacauguagcuaggauaugugauuucauauuuuuuaaaaaugugguguaaauaaguguaaaaaauuaccacuugcaaagugguuuuauuacagcguuaaagaaaaugacuagaauucugauagauugugcugaugaaccugguugugggcaauugaauucuugucuucccacuaccauuucaugacugucgucugaacacuauucaacaccauuaaauauaaacucugauauaaaa

SEQ ID NO: 18 - RNA, 2055 nt, homo sapien
aguuuuaauucugucucuaaucucugcaacagccgcgcuucccgggucccgcggcucccgcgcgcgaucugccgcggccggcugcugggcaaaaaucagagccgccuccgccccauuacccaucauggaaacccuccaggaaaaaguggccccggacgcgcgagccugaggauucugcacaaaagaggugcccaaaaugaagacccugaugcgccauggucuggcaguguguuuagcgcucaccaccaugugcaccagcuuguugcuaguguacagcagccucggcggccagaaggagcggcccccgcagcagcagcagcagcagcagcaacagcagcagcaggcgucggccaccggcagcucgcagccggcggcggagagcagcacccagcagcgccccgggguccccgcgggaccgcggccacuggacggauaccucggaguggcggaccacaagccccugaaaaugcacugcagggacugugcccuggugaccagcucagggcaucugcugcacagucggcaaggcucccagauugaccagacagagugugucauccgcaugaaugacgcccccacacgcggcuaugggcgugacgcgggcaaucgcaccagccugagggucaucgcgcauuccagcauccagaggauccuccgcaaccgccaugaccugcucaacgugagccagggcaccguguucaucuucuggggccccagcagcuacaugcggcgggacggcaagggccaggucuacaacaaccugcaucuccugagccaggugcugccccggcugaaggccuucaugauuacucgccacaagaugcugcaguuugaugagcucuucaagcaggagacuggcaaagacagauauccaacacuuggcucagcacuggcugguuuacaaugacaauugcacuggagcucugugacaggaucaauguuuauggcauggugcccccagacuucugcagggaucccaaucacccuucaguaccuuaucauuauuaugaaccuuuuggaccugaugaauguacaauguaccucucccaugagcgaggacgcaagggcagucaucaccgcuuuaucacagagaaacgagucuuuaagaacugggcacggacauucaauauucacuuuuuucaaccagacuggaaaccagaaucacuugcuauaaaucauccugagaauaaaccuguguucuaaggaaugagcaugccagacuguaaucccagguauucacugcaucagacaccgagacacugaacuuccugagccaccagacaggaaaggguagcagaaaacagcuucacuccucaggaaguaccauggacagacgccuaccaggggugacaaagcagugcaguuggauuguaaggaaaaauuccggaauuaaugcauccuaaugaauguuguccccuucaaugguguuaccuuaggagcugaacauucaauucaguuacaccacuaugacuaaaaacaguuuggaucucuuaguauugccuuugaaacugcaacauaagcaacucaacaauauuaguugcauuccuuuauagacauaccaugucaaagacguuuuucuaucaaguuguauucuuuccuguucuauaaccuuugucaucuguuagacucuguaugugugauuuguaaaaagcaggcugaaacuauggacaugauuucugaagagcacaucuccacugacuuucauaaagcaaauguccaauauuuauuuauugagaguuuuuuagugcaaucugggccaguauuuuuauagauuaugauuaugugguaauuuauccuuccuaacucuuuaauccugaaugaugguuggaaauggccuagaauuagguuacucuguucacaaugcucauuguuagcaugcaauugguauuugacuuggaaguguuguguuguauuuuuugaaccccuaggcuucaggaaaacugcucuuuuguaaaaagaauagcgaugacauuuucuaaugugcagaaauguuccaaaaggacaaaauugaaaaccaaaaacuauguuauuaaaacaaaaaaaugcuaacaagag

SEQ ID NO: 19 - DNA, 5547 bp, homo sapien
agttttaattctgtctctaatctctgcaacagccgcgcttcccgggtcccgcggctcccgcgcgcgatctgccgcggccggctgctgggcaaaaatcagagccgcctccgccccattacccatcatggaaaccctccaggaaaaagtggccccggacgcgcgagcctgaggattctgcacaaaagaggtgcccaaaatgaagaccctgatgcgccatggtctggcagtgtgtttagcgctcaccaccatgtgcaccagcttgttgctagtgtacagcagcctcggcggccagaaggagcggcccccgcagcagcagcagcagcagcagcaacagcagcagcaggcgtcggccaccggcagctcgcagccggcggcggagagcagcacccagcagcgccccggggtccccgcgggaccgcggccactggacggatacctcggagtggcggaccacaagcccctgaaaatgcactgcagggactgtgccctggtgaccagctcagggcatctgctgcacagtcggcaaggctcccagattgaccagacagagtgtgtcatccgcatgaatgacgcccccacacgcggctatgggcgtgacgtgggcaatcgcaccagcctgagggtcatcgcgcattccagcatccagaggatcctccgcaaccgccatgacctgctcaacgtgagccagggcaccgtgttcatcttctggggccccagcagctacatgcggcgggacggcaagggccaggtctacaacaacctgcatctcctgagccaggtgctgccccggctgaaggccttcatgattactcgccacaagatgctgcagtttgatgagctcttcaagcaggagactggcaaagacaggaagatatccaacacttggctcagcactggctggtttacaatgacaattgcactggagctctgtgacaggatcaatgtttatggcatggtgcccccagacttctgcagggatcccaatcacccttcagtaccttatcattattatgaaccttttggacctgatgaatgtacaatgtacctctcccatgagcgaggacgcaagggcagtcatcaccgctttatcacagagaaacgagtctttaagaactgggcacggacattcaatattcacttttttcaaccagactggaaaccagaatcacttgctataaatcatcctgagaataaacctgtgttctaaggaatgagcatgccagactgtaatcccaggtattcactgcatcagacaccgagacactgaacttcctgagccaccagacaggaaagggtagcagaaaacagcttcactcctcaggaagtaccatggacagacgcctaccaggggtgacaaagcagtgcagttggattgtaaggaaaaattccggaattaatgcatcctaatgaatgttgtccccttcaatggtgttaccttaggagctgaacattcaattcagttacaccactatgactaaaaacagtttggatctcttagtattgcctttgaaactgcaacataagcaactcaacaatattagttgcattcctttatagacataccatgtcaaagacgtttttctatcaagttgtattctttcctgttctataacctttgtcatctgttagactctgtatgtgtgatttgtaaaaagcaggctgaaactatggacatgatttctgaagagcacatctccactgactttcataaagcaaatgtccaatatttatttattgagagttttttagtgcaatctgggccagtatttttatagattatgattatgtggtaatttatccttcctaactctttaatcctgaatgatggttggaaatggcctagaattaggttactctgttcacaatgctcattgttagcatgcaattggtatttgacttggaagtgttgtgttgtattttttgaacccctaggcttcaggaaaactgctcttttgtaaaaagaatagcgatgacattttctaatgtgcagaaatgttccaaaaggacaaaattgaaaaccaaaaactatgttattaaaacaaaaaaatgctaacaagagaaatttaaaggtagttttctttagtaataatttatgtaagtgtcctctcttgagccctagtttcctttttggcagaatgatgtcactgtaccagacaacctcttaggtttcatcccaaatctaaacttgtggcctcttcttgacccatttgaagactctgcacttggagtgatggggccccaacagtagcaggaactttattttggggagccttatctacattcatattacttatatcactcttgtggttaaaactacacttcttcctgtgtccacatgggctaaaatctaccccctgcttctctcgaagcatcaccatccgcctcttccccagcctctcaacacaaaaacacaggatacacacacacacacacacacaaaagacatagctccaaggggttccctggctacaatagcaaacagctgcccttctgtgaggaaaagagactacaaggacatgccctatcattcaactcatttatgctatgaactgtttagactcactacaaatcttcttagattatattcattaccattccctggtctgaaggagtataaaggacttattttattcagagccaagataaattcatattatagatttttatttaaacaagtaatattgttcaaaaatagtctcttataaatatactagtgttttctttacacatgacttagaaggcattagtttctctaatgccaaatttgaaggcaccagcaaatattatgtatgaagactgacattgttttacagacatgacctggcttatgataaaagaagttttatcgcattaccacttcttttcccttttcttaattagtacactaactagtactattaattacacggagtattgttgttaaaatgcaaacacaatcagggtactcacataacataaacaaagttgatattgatgtgtatggcttgggctgttcaaagccagtaagattgaaatggccgtccaaaacatactggaatatgttctttaagttttctcatagtttttaaagggactatgaattttattccaacacattgtcttccacagcatggactctgaacacatcatactttatcaacatatgaaaaagtgtattaattttatacaatttacttataggccacctttataatcacttgaagacgttatgttgctcaaacataagtggctcctttggcaatttctatatttgtggaaatttggaaaggcatagtttcaacatgcaagaatgtaattatattgcttcatctaataatatctcacatatctgtctatcttcagattttagattttctttattaaaaaaaccatcatggtagctccatctcgtttgtaacttctccctctcaaatactcagaagaatgaagaggccaaattcagaaaatcatggcttcactgggaaatgttttaaatctacatgtagctaggatatgtgatttcatattttttaaaaatgtggtgtaaataagtgtaaaaaattaccacttgcaaagtggttttattacagcgttaaagaaaatgactagaattctgatagattgtgctgatgaacctggttgtgggcaattgaattcttgtcttcccactaccatttcatgactgtcgtctgaacactattcaacaccattaaatataaactctgatataaaagatgactacagaaccatgtttatagacctcggtgatttcagtatctgattgtgtttgatgcctaagtcatactcgttatgttacatgcctttttcctctctcccagctgtgtcatcagctccctcctagcttttaagaccacagtaatacaatgccacagctggtcgatccatggcttctgttatttcaacacaagaacatttggcagaggccattacaatagatagccattatgggcaaagatacgggaatttgcaaacaaaatcaatcacttcaaatggcccataaaaggaggaatctcagatttaatattctacggtaaatattcacccaagaaagcatacattaaaagaacattaggaggtaaatattcagcatgctgcatggagacttagctgtgtgatttccattaccgttaatgggcatttggcaactaagtccctgtgctttgctaaccctggtgtgtactcctaagggctacacataaaacctgagcaattcagagacttctgaggtcatcagatttcagagtaagatcttttctttaaaaaaaaaaatagatgaaagcaaaacacaacgtattgtacctaaaagagaaatttgtgtggtctctcacaatccttaggttactaccagatttgtgtatcctttgttttctgaagttctctccattactgatctatttgaatgacatgagaatggagggaaataatctcattttgaaataaaaactcccctcaaaaattaaaattaccgacttagaagatgataaatgctaagtaaaagtagaaggagaaagttgaaattctattaggattaagacagtgttatttaaaggcacatgcacccatttagtacctgcctaaatatttgcccttgtgtaagagcaaactcatttcagaaatatatcctgaattccaccagggtgatggttcaaattgttaaataaacctactctgaaagaagggtccatgttcctattctctctctgcagtgttgggaggtgatgttaacactctacatgttttgtatctgacccaatcatttcttccattctcattgcttctctcttaaacctcattgtatctctttactgtcattttctcccaattgtcttcttttgtctacagtgtgctcctaaaccagcagtctttggtgctgttaaggtcttccttgtaggtttttaaactaaagatctatctgggaaacagatttggggtaggtcctgccagagtaatgaccatggtaggtgggaggaatatatctggctaccatacaaggtacttcagaagtaccattatggtttgcccagggccaagtggggagtgaagaagaggggtccccaagacacagacttcagtgctaaaaccagggaagtcctgggctccatgacagtggctcaccctatcagaaggccacgtcaaagagaactataataataagccctggggggcaggatgtgtgaaccaattgcctaggtgttagcacatgccagaaggtactttggaatggaaagaggtgagagtgtctcaaggtttaaaaatgagcaagtgtagcccctcttttgtagctcactcatcccaccttctcagggtgttgaaatgcaaatgcaaaaaggctgaaaccctgtttctttctactcagtgccctaatattatatactaccttgaattgtgcttcgtctttttatgcatgtgtcctgttagtctaattagattgtaagctccttgagggcagagactctttctcctttgtctctgcagcctatacctagtatagtgccttgcacacaataggtgctcaataaatgtctgttgttgatcatgacctcttaa

SEQ ID NO: 20 - DNA, 2090 bp, homo sapien
agttgtgtagatcgctgagagactacgagggtccggttcagttttaattctgtctctaatctctgcaacagccgcgcttcccgggtcccgcggctcccgcgcgcgatctgccgcggccggctgctgggcaaaaatcagagccgcctccgccccattacccatcatggaaaccctccaggaaaaagtggccccggacgcgcgagcctgaggattctgcacaaaagaggtgcccaaaatgaagaccctgatgcgccatggtctggcagtgtgtttagcgctcaccaccatgtgcaccagcttgttgctagtgtacagcagcctcggcggccagaaggagcggcccccgcagcagcagcagcagcagcagcaacagcagcagcaggcgtcggccaccggcagctcgcagccggcggcggagagcagcacccagcagcgccccggggtccccgcgggaccgcggccactggacggatacctcggagtggcggaccacaagcccctgaaaatgcactgcagggactgtgccctggtgaccagctcagggcatctgctgcacagtcggcaaggctcccagattgaccagacagagtgtgtcatccgcatgaatgacgcccccacacgcggctatgggcgtgacgtgggcaatcgcaccagcctgagggtcatcgcgcattccagcatccagaggatcctccgcaaccgccatgacctgctcaacgtgagccagggcaccgtgttcatcttctggggccccagcagctacatgcggcgggacggcaagggccaggtctacaacaacctgcatctcctgagccaggtgctgccccggctgaaggccttcatgattactcgccacaagatgctgcagtttgatgagctcttcaagcaggagactggcaaagacaggaagatatccaacacttggctcagcactggctggtttacaatgacaattgcactggagctctgtgacaggatcaatgtttatggcatggtgcccccagacttctgcagggatcccaatcacccttcagtaccttatcattattatgaaccttttggacctgatgaatgtacaatgtacctctcccatgagcgaggacgcaagggcagtcatcaccgctttatcacagagaaacgagtctttaagaactgggcacggacattcaatattcacttttttcaaccagactggaaaccagaatcacttgctataaatcatcctgagaataaacctgtgttctaaggaatgagcatgccagactgtaatcccaggtattcactgcatcagacaccgagacactgaacttcctgagccaccagacaggaaagggtagcagaaaacagcttcactcctcaggaagtaccatggacagacgcctaccaggggtgacaaagcagtgcagttggattgtaaggaaaaattccggaattaatgcatcctaatgaatgttgtccccttcaatggtgttaccttaggagctgaacattcaattcagttacaccactatgactaaaaacagtttggatctcttagtattgcctttgaaactgcaacataagcaactcaacaatattagttgcattcctttatagacataccatgtcaaagacgtttttctatcaagttgtattctttcctgttctataacctttgtcatctgttagactctgtatgtgtgatttgtaaaaagcaggctgaaactatggacatgatttctgaagagcacatctccactgactttcataaagcaaatgtccaatatttatttattgagagttttttagtgcaatctgggccagtatttttatagattatgattatgtggtaatttatccttcctaactctttaatcctgaatgatggttggaaatggcctagaattaggttactctgttcacaatgctcattgttagcatgcaattggtatttgacttggaagtgttgtgttgtattttttgaacccctaggcttcaggaaaactgctcttttgtaaaaagaatagcgatgacattttctaatgtgcagaaatgttccaaaaggacaaaattgaaaaccaaaaactatgttattaaaacaaaaaaatgct

SEQ ID NO: 21 - DNA, 2017 bp, homo sapien
agttttaattctgtctctaatctctgcaacagccgcgcttcccgggtcccgcggctcccgcgcgcgatctgccgcggccggctgctgggcaaaaatcagagccgcctccgccccattacccatcatggaaaccctccaggaaaaagtggccccggacgcgcgagcctgaggattctgcacaaaagaggtgcccaaaatgaagaccctgatgcgccatggtctggcagtgtgtttagcgctcaccaccatgtgcaccagcttgttgctagtgtacagcagcctcggcggccagaaggagcggcccccgcagcagcagcagcagctcgcagccggcggcggagagcagcacccagcagcgccccggggtccccgcgggaccgcggccactggacggatacctcggagtggcggaccacaagcccctgaaaatgtactgcagggactgtgccctggtgaccagctcagggcatctgctgcacagtcggcaaggctcccagattgaccagacagagtgtgtcgtccgcatgaatgacgcccccacacgcggctatgggcgtgacgtgggcaatcgcaccagcctgagggtcatcgcgcattccagcatccagaggatcctccgcaaccgccatgacctgctcaacgtgagccagggcaccgtgttcatcttctggggccccagcagctacatgcggcgggacggcaagggccaggtctacaacaacctgcatctcctgagccaggtgctgccccggctgaaggccttcatgattactcgccacaagatgctgcagtttgatgagctcttcaagcaggagactggcaaagacagatatccaacacttggctcagcactggctggtttacaatgacaattgcactggagctctgtgacaggatcaatgtttatggcatggtgcccccagacttctgcagggatcccaatcacccttcagtaccttatcattattatgaaccttttggacctgatgaatgtacaatgtacctctcccatgagcgaggacgcaagggcagtcatcaccgctttatcacagagaaacgagtctttaagaactgggcacggacattcaatattcacttttctcaaccagactggaaaccagaatcacttgctataaatcatcctgagaataaacctgtgttctaaggaatgagcatgccagactgtaatcccaggtattcactgcatcagacaccgagacactgaacttcctgagccaccagacaggaaagggtagcagaaaacagcttcactcctcaggaagtaccatggacagacgcctaccaggggtgacaaagcagtgcagttggattgtaaggaaaaattccggaattaatgcatcctaatgaatgttgtccccttcaatggtgttaccttaggagctgaacattcaattcagttacaccactatgactaaaaacagtttggatctcttagtattgcctttgaaactgcaacataagcaactcaacaatattagttgcattcctttatagacataccatgtcaaagacgtttttctatcaagttgtattctttcctgttctataacctttgtcatctgttagactctgtatgtgtgatttgtaaaaagcaggctgaaactatggacatgatttctgaagagcacatctccactgactttcataaagcaaatgtccaatatttatttattgagagttttttagtgcaatctgggccagtatttttatagattatgattatgtggtaatttatccttcctaactctttaatcctgaatgatggttggaaatggcctagaattaggttactctgttcacaatgctcattgttagcatgcaattggtatttgacttggaagtgttgtgttgtattttttgaacccctaggcttcagggaaactgctcttttgtaaaaagaatagcgatgacattttctaatgtgcagaaatgttccaaaaggacaaaattgaaaaccaaaaactatgttattaaaacaaaaaaatgctaacaagag

SEQ ID NO: 22 - DNA, 1291 bp, homo sapien
gtctctaatctctgcaacagccgcgcttcccgggtcccgcggctcccgcgcgcgatctgccgcggccggctgctgggcaaaaatcagagccgcctccgccccattacccatcatggaaaccctccaggaaaaagtggccccggacgcgcgagcctgaggattctgcacaaaagaggtgcccaaaatgaagaccctgatgcgccatggtctggcagtgtgtttagcgctcaccaccatgtgcaccagcttgttgctagtgtacagcagcctcggcggccagaaggagcggcggagagcagcacccagcagcgccccggggtccccgcgggaccgcggccactggacggatacctcggagtggcggaccacaagcccctgaaaatgcactgcagggactgtgccctggtgaccagctcagggcatctgctgcacagtcggcaaggctcccagattgaccagacagagtgtgtcatccgcatgaatgacgcccccacacgcggctatgggcgtgacgtgggcaatcgcaccagcctgagggtcatcgcgcattccagcatccagaggatcctccgcaaccgccatgacctgctcaacgtgagccagggcaccgtgttcatcttctggggccccagcagctacatgcggcgggacggcaagggccaggtctacaacaacctgcatctcctgagccaggtgctgccccggctgaaggccttcatgattactcgccacaagatgctgcagtttgatgagctcttcaagcaggagactggcaaagacaggaagatatccaacacttggctcagcactggctggtttacaatgacaattgcactggagctctgtgacaggatcaatgtttatggcatggtgcccccagacttctgcagggatcccaatcacccttcagtaccttatcattattatgaaccttttggacctgatgaatgtacaatgtacctctcccatgagcgaggacgcaagggcagtcatcaccgctttatcacagagaaacgagtctttaagaactgggcacggacattcaatattcacttttttcaaccagactggaaaccagaatcacttgctataaatcatcctgagaataaacctgtgttctaaggaatgagcatgccagactgtaatcccaggtattcactgcatcagacaccgagacactgaacttcctgagccaccagacaggaaagggtagcagaaaacagcttcactcctcaggaagtaccatggacagacgcctaccaggggtgacaaagcagtgcagttggattgt

SEQ ID NO: 23 - DNA, 2048 bp, homo sapien
ctctgcaacagccgcgcttcccgggtcccgcggctcccgcgcgcgatctgccgcggccggctgctgggcaaaaatcagagccgcctccgccccattacccatcatggaaaccctccaggaaaaagtggccccggacgcgcgagcctgaggattctgcacaaaagaggtgcccaaaatgaagaccctgatgcgccatggtctggcagtgtgtttagcgctcaccaccatgtgcaccagcttgttgctagtgtacagcagcctcggcggccagaaggagcggcccccgcagcagcagcagcagcagcagcaacagcagcagcaggcgtcggccaccggcagctcgcagccggcggcggagagcagcacccagcagcgccccggggtccccgcgggaccgcggccactggacggatacctcggagtggcggaccacaagcccctgaaaatgcactgcagggactgtgccctggtgaccagctcagggcatctgctgcacagtcggcaaggctcccagattgaccagacagagtgtgtcatccgcatgaatgacgcccccacacgcggctatgggcgtgacgtgggcaatcgcaccagcctgagggtcatcgcgcattccagcatccagaggatcctccgcaaccgccatgacctgctcaacgtgagccagggcaccgtgttcatcttctggggccccagcagctacatgcggcgggacggcaagggccaggtctacaacaacctgcatctcctgagccaggtgctgccccggctgaaggccttcatgattactcgccacaagatgctgcagtttgatgagctcttcaagcaggagactggcaaagacaggaagatatccaacacttggctcagcactggctggtttacaatgacaattgcactggagctctgtgacaggatcaatgtttatggcatggtgcccccagacttctgcagggatcccaatcacccttcagtaccttatcattattatgaaccttttggacctgatgaatgtacaatgtacctctcccatgagcgaggacgcaagggcagtcatcaccgctttatcacagagaaacgagtctttaagaactgggcacggacattcaatattcacttttttcaaccagactggaaaccagaatcacttgctataaatcatcctgagaataaacctgtgttctaaggaatgagcatgccagactgtaatcccaggtattcactgcatcagacaccgagacactgaacttcctgagccaccagacaggaaagggtagcagaaaacagcttcactcctcaggaagtaccatggacagacgcctaccaggggtgacaaagcagtgcagttggattgtaaggaaaaattccggaattaatgcatcctaatgaatgttgtccccttcaatggtgttaccttaggagctgaacattcaattcagttacaccactatgactaaaaacagtttggatctcttagtattgcctttgaaactgcaacataagcaactcaacaatattagttgcattcctttatagacataccatgtcaaagacgtttttctatcaagttgtattctttcctgttctataacctttgtcatctgttagactctgtatgtgtgatttgtaaaaagcaggctgaaactatggacatgatttctgaagagcacatctccactgactttcataaagcaaatgtccaatatttatttattgagagttttttagtgcaatctgggccagtatttttatagattatgattatgtggtaatttatccttcctaactctttaatcctgaatgatggttggaaatggcctagaattaggttactctgttcacaatgctcattgttagcatgcaattggtatttgacttggaagtgttgtgttgtattttttgaacccctaggcttcaggaaaactgctcttttgtaaaaagaatagcgatgacattttctaatgtgcagaaatgttccaaaaggacaaaattgaaaaccaaaaactatgttattaaaacaaaaaaatgctaaaaaaaaaaaaaaaaaa

SEQ ID NO: 24 - DNA, 1041 bp, homo sapien
gaggtgcccaaaatgaagaccctgatgcgccatggtctggcagtgtgtttagcgctcaccaccatgtgcaccagcttgttgctagtgtacagcagcctcggcggccagaaggagcggcccccgcagcagcagcagcagcagcagcaacagcagcagcaggcgtcggccaccggcagctcgcagccggcggcggagagcagcacccagcagcgccccggggtccccgcgggaccgcggccactggacggatacctcggagtggcggaccacaagcccctgaaaatgcactgcagggactgtgccctggtgaccagctcagggcatctgctgcacagtcggcaaggctcccagattgaccagacagagtgtgtcatccgcatgaatgacgcccccacacgcggctatgggcgtgacgtgggcaatcgcaccagcctgagggtcatcgcgcattccagcatccagaggatcctccgcaaccgccatgacctgctcaacgtgagccagggcaccgtgttcatcttctggggccccagcagctacatgcggcgggacggcaagggccaggtctacaacaacctgcatctcctgagccaggtgctgccccggctgaaggccttcatgattactcgccacaagatgctgcagtttgatgagctcttcaagcaggagactggcaaagacaggaagatatccaacacttggctcagcactggctggtttacaatgacaattgcactggagctctgtgacaggatcaatgtttatggcatggtgcccccagacttctgcagggatcccaatcacccttcagtaccttatcattattatgaaccttttggacctgatgaatgtacaatgtacctctcccatgagcgaggacgcaagggcagtcatcaccgctttatcacagagaaacgagtctttaagaactgggcacggacattcaatattcacttttttcaaccagactggaaaccagaatcacttgctataaatcatcctgagaataaacctgtgttctaaggaatgagcatgccagac

SEQ ID NO: 25 - DNA, 3751 bp, homo sapien
agttgtgtagatcgctgagagactacgagggtccggttcagttttaattctgtctctaatctctgcaacagccgcgcttcccgggtcccgcggctcccgcgcgcgatctgccgcggccggctgctgggcaaaaatcagagccgcctccgccccattacccatcatggaaaccctccaggaaaaagtggccccggacgcgcgagcctgaggattctgcacaaaagaggtgcccaaaatgaagaccctgatgcgccatggtctggcagtgtgtttagcgctcaccaccatgtgcaccagcttgttgctagtgtacagcagcctcggcggccagaaggagcggcccccgcagcagcagcagcagcagcagcaacagcagcagcaggcgtcggccaccggcagctcgcagccggcggcggagagcagcacccagcagcgccccggggtccccgcgggaccgcggccactggacggatacctcggagtggcggaccacaagcccctgaaaatgcactgcagggactgtgccctggtgaccagctcagggcatctgctgcacagtcggcaaggctcccagattgaccagacagagtgtgtcatccgcatgaatgacgcccccacacgcggctatgggcgtgacgtgggcaatcgcaccagcctgagggtcatcgcgcattccagcatccagaggatcctccgcaaccgccatgacctgctcaacgtgagccagggcaccgtgttcatcttctggggccccagcagctacatgcggcgggacggcaagggccaggtctacaacaacctgcatctcctgagccaggtgctgccccggctgaaggccttcatgattactcgccacaagatgctgcagtttgatgagctcttcaagcaggagactggcaaagacaggaagatatccaacacttggctcagcactggctggtttacaatgacaattgcactggagctctgtgacaggatcaatgtttatggcatggtgcccccagacttctgcagggatcccaatcacccttcagtaccttatcattattatgaaccttttggacctgatgaatgtacaatgtacctctcccatgagcgaggacgcaagggcagtcatcaccgctttatcacagagaaacgagtctttaagaactgggcacggacattcaatattcacttttttcaaccagactggaaaccagaatcacttgctataaatcatcctgagaataaacctgtgttctaaggaatgagcatgccagactgtaatcccaggtattcactgcatcagacaccgagacactgaacttcctgagccaccagacaggaaagggtagcagaaaacagcttcactcctcaggaagtaccatggacagacgcctaccaggggtgacaaagcagtgcagttggattgtaaggaaaaattccggaattaatgcatcctaatgaatgttgtccccttcaatggtgttaccttaggagctgaacattcaattcagttacaccactatgactaaaaacagtttggatctcttagtattgcctttgaaactgcaacataagcaactcaacaatattagttgcattcctttatagacataccatgtcaaagacgtttttctatcaagttgtattctttcctgttctataacctttgtcatctgttagactctgtatgtgtgatttgtaaaaagcaggctgaaactatggacatgatttctgaagagcacatctccactgactttcataaagcaaatgtccaatatttatttattgagagttttttagtgcaatctgggccagtatttttatagattatgattatgtggtaatttatccttcctaactctttaatcctgaatgatggttggaaatggcctagaattaggttactctgttcacaatgctcattgttagcatgcaattggtatttgacttggaagtgttgtgttgtattttttgaacccctaggcttcaggaaaactgctcttttgtaaaaagaatagcgatgacattttctaatgtgcagaaatgttccaaaaggacaaaattgaaaaccaaaaactatgttattaaaacaaaaaaatgctaacaagagaaatttaaaggtagttttctttagtaataatttatgtaagtgtcctctcttgagccctagtttcctttttggcagaatgatgtcactgtaccagacaacctcttaggtttcatcccaaatctaaacttgtggcctcttcttgacccatttgaagactctgcacttggagtgatggggccccaacagtagcaggaactttattttggggagccttatctacattcatattacttatatcactcttgtggttaaaactacacttcttcctgtgtccacatgggctaaaatctaccccctgcttctctcgaagcatcaccatccgcctcttccccagcctctcaacacaaaaacacaggatacacacacacacacacacacaaaagacatagctccaaggggttccctggctacaatagcaaacagctgcccttctgtgaggaaaagagactacaaggacatgccctatcattcaactcatttatgctatgaactgtttagactcactacaaatcttcttagattatattcattaccattccctggtctgaaggagtataaaggacttattttattcagagccaagataaattcatattatagatttttatttaaacaagtaatattgttcaaaaatagtctcttataaatatactagtgttttctttacacatgacttagaaggcattagtttctctaatgccaaatttgaaggcaccagcaaatattatgtatgaagactgacattgttttacagacatgacctggcttatgataaaagaagttttatcgcattaccacttcttttcccttttcttaattagtacactaactagtactattaattacacggagtattgttgttaaaatgcaaacacaatcagggtactcacataacataaacaaagttgatattgatgtgtatggcttgggctgttcaaagccagtaagattgaaatggccgtccaaaacatactggaatatgttctttaagttttctcatagtttttaaagggactatgaattttattccaacacattgtcttccacagcatggactctgaacacatcatactttatcaacatatgaaaaagtgtattaattttatacaatttacttataggccacctttataatcacttgaagacgttatgttgctcaaacataagtggctcctttggcaatttctatatttgtggaaatttggaaaggcatagtttcaacatgcaagaatgtaattatattgcttcatctaataatatctcacatatctgtctatcttcagattttagattttctttattaaaaaaaccatcatggtagctccatctcgtttgtaacttctccctctcaaatactcagaagaatgaagaggccaaattcagaaaatcatggcttcactgggaaatgttttaaatctacatgtagctaggatatgtgatttcatattttttaaaaatgtggtgtaaataagtgtaaaaaattaccacttgcaaagtggttttattacagcgttaaagaaaatgactagaattctgatagattgtgctgatgaacctggttgtgggcaattgaattcttgtcttcccactaccatttcatgactgtcgtctgaacactattcaacaccattaaatataaactctgatataaaa

SEQ ID NO: 26 - DNA, 2055 bp, homo sapien
agttttaattctgtctctaatctctgcaacagccgcgcttcccgggtcccgcggctcccgcgcgcgatctgccgcggccggctgctgggcaaaaatcagagccgcctccgccccattacccatcatggaaaccctccaggaaaaagtggccccggacgcgcgagcctgaggattctgcacaaaagaggtgcccaaaatgaagaccctgatgcgccatggtctggcagtgtgtttagcgctcaccaccatgtgcaccagcttgttgctagtgtacagcagcctcggcggccagaaggagcggcccccgcagcagcagcagcagcagcagcaacagcagcagcaggcgtcggccaccggcagctcgcagccggcggcggagagcagcacccagcagcgccccggggtccccgcgggaccgcggccactggacggatacctcggagtggcggaccacaagcccctgaaaatgcactgcagggactgtgccctggtgaccagctcagggcatctgctgcacagtcggcaaggctcccagattgaccagacagagtgtgtcatccgcatgaatgacgcccccacacgcggctatgggcgtgacgtgggcaatcgcaccagcctgagggtcatcgcgcattccagcatccagaggatcctccgcaaccgccatgacctgctcaacgtgagccagggcaccgtgttcatcttctggggccccagcagctacatgcggcgggacggcaagggccaggtctacaacaacctgcatctcctgagccaggtgctgccccggctgaaggccttcatgattactcgccacaagatgctgcagtttgatgagctcttcaagcaggagactggcaaagacagatatccaacacttggctcagcactggctggtttacaatgacaattgcactggagctctgtgacaggatcaatgtttatggcatggtgcccccagacttctgcagggatcccaatcacccttcagtaccttatcattattatgaaccttttggacctgatgaatgtacaatgtacctctcccatgagcgaggacgcaagggcagtcatcaccgctttatcacagagaaacgagtctttaagaactgggcacggacattcaatattcacttttttcaaccagactggaaaccagaatcacttgctataaatcatcctgagaataaacctgtgttctaaggaatgagcatgccagactgtaatcccaggtattcactgcatcagacaccgagacactgaacttcctgagccaccagacaggaaagggtagcagaaaacagcttcactcctcaggaagtaccatggacagacgcctaccaggggtgacaaagcagtgcagttggattgtaaggaaaaattccggaattaatgcatcctaatgaatgttgtccccttcaatggtgttaccttaggagctgaacattcaattcagttacaccactatgactaaaaacagtttggatctcttagtattgcctttgaaactgcaacataagcaactcaacaatattagttgcattcctttatagacataccatgtcaaagacgtttttctatcaagttgtattctttcctgttctataacctttgtcatctgttagactctgtatgtgtgatttgtaaaaagcaggctgaaactatggacatgatttctgaagagcacatctccactgactttcataaagcaaatgtccaatatttatttattgagagttttttagtgcaatctgggccagtatttttatagattatgattatgtggtaatttatccttcctaactctttaatcctgaatgatggttggaaatggcctagaattaggttactctgttcacaatgctcattgttagcatgcaattggtatttgacttggaagtgttgtgttgtattttttgaacccctaggcttcaggaaaactgctcttttgtaaaaagaatagcgatgacattttctaatgtgcagaaatgttccaaaaggacaaaattgaaaaccaaaaactatgttattaaaacaaaaaaatgctaacaagag

SEQ ID NO: 27 - DNA, 5547 bp, homo sapien
agttttaattctgtctctaatctctgcaacagccgcgcttcccgggtcccgcggctcccgcgcgcgatctgccgcggccggctgctgggcaaaaatcagagccgcctccgccccattacccatcatggaaaccctccaggaaaaagtggccccggacgcgcgagcctgaggattctgcacaaaagaggtgcccaaaatgaagaccctgatgcgccatggtctggcagtgtgtttagcgctcaccaccatgtgcaccagcttgttgctagtgtacagcagcctcggcggccagaaggagcggcccccgcagcagcagcagcagcagcagcaacagcagcagcaggcgtcggccaccggcagctcgcagccggcggcggagagcagcacccagcagcgccccggggtccccgcgggaccgcggccactggacggatacctcggagtggcggaccacaagcccctgaaaatgcactgcagggactgtgccctggtgaccagctcagggcatctgctgcacagtcggcaaggctcccagattgaccagacagagtgtgtcatccgcatgaatgacgcccccacacgcggctatgggcgtgacgcgggcaatcgcaccagcctgagggtcatcgcgcattccagcatccagaggatcctccgcaaccgccatgacctgctcaacgtgagccagggcaccgtgttcatcttctggggccccagcagctacatgcggcgggacggcaagggccaggtctacaacaacctgcatctcctgagccaggtgctgccccggctgaaggccttcatgattactcgccacaagatgctgcagtttgatgagctcttcaagcaggagactggcaaagacaggaagatatccaacacttggctcagcactggctggtttacaatgacaattgcactggagctctgtgacaggatcaatgtttatggcatggtgcccccagacttctgcagggatcccaatcacccttcagtaccttatcattattatgaaccttttggacctgatgaatgtacaatgtacctctcccatgagcgaggacgcaagggcagtcatcaccgctttatcacagagaaacgagtctttaagaactgggcacggacattcaatattcacttttttcaaccagactggaaaccagaatcacttgctataaatcatcctgagaataaacctgtgttctaaggaatgagcatgccagactgtaatcccaggtattcactgcatcagacaccgagacactgaacttcctgagccaccagacaggaaagggtagcagaaaacagcttcactcctcaggaagtaccatggacagacgcctaccaggggtgacaaagcagtgcagttggattgtaaggaaaaattccggaattaatgcatcctaatgaatgttgtccccttcaatggtgttaccttaggagctgaacattcaattcagttacaccactatgactaaaaacagtttggatctcttagtattgcctttgaaactgcaacataagcaactcaacaatattagttgcattcctttatagacataccatgtcaaagacgtttttctatcaagttgtattctttcctgttctataacctttgtcatctgttagactctgtatgtgtgatttgtaaaaagcaggctgaaactatggacatgatttctgaagagcacatctccactgactttcataaagcaaatgtccaatatttatttattgagagttttttagtgcaatctgggccagtatttttatagattatgattatgtggtaatttatccttcctaactctttaatcctgaatgatggttggaaatggcctagaattaggttactctgttcacaatgctcattgttagcatgcaattggtatttgacttggaagtgttgtgttgtattttttgaacccctaggcttcaggaaaactgctcttttgtaaaaagaatagcgatgacattttctaatgtgcagaaatgttccaaaaggacaaaattgaaaaccaaaaactatgttattaaaacaaaaaaatgctaacaagagaaatttaaaggtagttttctttagtaataatttatgtaagtgtcctctcttgagccctagtttcctttttggcagaatgatgtcactgtaccagacaacctcttaggtttcatcccaaatctaaacttgtggcctcttcttgacccatttgaagactctgcacttggagtgatggggccccaacagtagcaggaactttattttggggagccttatctacattcatattacttatatcactcttgtggttaaaactacacttcttcctgtgtccacatgggctaaaatctaccccctgcttctctcgaagcatcaccatccgcctcttccccagcctctcaacacaaaaacacaggatacacacacacacacacacacaaaagacatagctccaaggggttccctggctacaatagcaaacagctgcccttctgtgaggaaaagagactacaaggacatgccctatcattcaactcatttatgctatgaactgtttagactcactacaaatcttcttagattatattcattaccattccctggtctgaaggagtataaaggacttattttattcagagccaagataaattcatattatagatttttatttaaacaagtaatattgttcaaaaatagtctcttataaatatactagtgttttctttacacatgacttagaaggcattagtttctctaatgccaaatttgaaggcaccagcaaatattatgtatgaagactgacattgttttacagacatgacctggcttatgataaaagaagttttatcgcattaccacttcttttcccttttcttaattagtacactaactagtactattaattacacggagtattgttgttaaaatgcaaacacaatcagggtactcacataacataaacaaagttgatattgatgtgtatggcttgggctgttcaaagccagtaagattgaaatggccgtccaaaacatactggaatatgttctttaagttttctcatagtttttaaagggactatgaattttattccaacacattgtcttccacagcatggactctgaacacatcatactttatcaacatatgaaaaagtgtattaattttatacaatttacttataggccacctttataatcacttgaagacgttatgttgctcaaacataagtggctcctttggcaatttctatatttgtggaaatttggaaaggcatagtttcaacatgcaagaatgtaattatattgcttcatctaataatatctcacatatctgtctatcttcagattttagattttctttattaaaaaaaccatcatggtagctccatctcgtttgtaacttctccctctcaaatactcagaagaatgaagaggccaaattcagaaaatcatggcttcactgggaaatgttttaaatctacatgtagctaggatatgtgatttcatattttttaaaaatgtggtgtaaataagtgtaaaaaattaccacttgcaaagtggttttattacagcgttaaagaaaatgactagaattctgatagattgtgctgatgaacctggttgtgggcaattgaattcttgtcttcccactaccatttcatgactgtcgtctgaacactattcaacaccattaaatataaactctgatataaaagatgactacagaaccatgtttatagacctcggtgatttcagtatctgattgtgtttgatgcctaagtcatactcgttatgttacatgcctttttcctctctcccagctgtgtcatcagctccctcctagcttttaagaccacagtaatacaatgccacagctggtcgatccatggcttctgttatttcaacacaagaacatttggcagaggccattacaatagatagccattatgggcaaagatacgggaatttgcaaacaaaatcaatcacttcaaatggcccataaaaggaggaatctcagatttaatattctacggtaaatattcacccaagaaagcatacattaaaagaacattaggaggtaaatattcagcatgctgcatggagacttagctgtgtgatttccattaccgttaatgggcatttggcaactaagtccctgtgctttgctaaccctggtgtgtactcctaagggctacacataaaacctgagcaattcagagacttctgaggtcatcagatttcagagtaagatcttttctttaaaaaaaaaaatagatgaaagcaaaacacaacgtattgtacctaaaagagaaatttgtgtggtctctcacaatccttaggttactaccagatttgtgtatcctttgttttctgaagttctctccattactgatctatttgaatgacatgagaatggagggaaataatctcattttgaaataaaaactcccctcaaaaattaaaattaccgacttagaagatgataaatgctaagtaaaagtagaaggagaaagttgaaattctattaggattaagacagtgttatttaaaggcacatgcacccatttagtacctgcctaaatatttgcccttgtgtaagagcaaactcatttcagaaatatatcctgaattccaccagggtgatggttcaaattgttaaataaacctactctgaaagaagggtccatgttcctattctctctctgcagtgttgggaggtgatgttaacactctacatgttttgtatctgacccaatcatttcttccattctcattgcttctctcttaaacctcattgtatctctttactgtcattttctcccaattgtcttcttttgtctacagtgtgctcctaaaccagcagtctttggtgctgttaaggtcttccttgtaggtttttaaactaaagatctatctgggaaacagatttggggtaggtcctgccagagtaatgaccatggtaggtgggaggaatatatctggctaccatacaaggtacttcagaagtaccattatggtttgcccagggccaagtggggagtgaagaagaggggtccccaagacacagacttcagtgctaaaaccagggaagtcctgggctccatgacagtggctcaccctatcagaaggccacgtcaaagagaactataataataagccctggggggcaggatgtgtgaaccaattgcctaggtgttagcacatgccagaaggtactttggaatggaaagaggtgagagtgtctcaaggtttaaaaatgagcaagtgtagcccctcttttgtagctcactcatcccaccttctcagggtgttgaaatgcaaatgcaaaaaggctgaaaccctgtttctttctactcagtgccctaatattatatactaccttgaattgtgcttcgtctttttatgcatgtgtcctgttagtctaattagattgtaagctccttgagggcagagactctttctcctttgtctctgcagcctatacctagtatagtgccttgcacacaataggtgctcaataaatgtctgttgttgatcatgacctcttaa

SEQ ID NO: 28 - DNA, 2090 bp, homo sapien
agttgtgtagatcgctgagagactacgagggtccggttcagttttaattctgtctctaatctctgcaacagccgcgcttcccgggtcccgcggctcccgcgcgcgatctgccgcggccggctgctgggcaaaaatcagagccgcctccgccccattacccatcatggaaaccctccaggaaaaagtggccccggacgcgcgagcctgaggattctgcacaaaagaggtgcccaaaatgaagaccctgatgcgccatggtctggcagtgtgtttagcgctcaccaccatgtgcaccagcttgttgctagtgtacagcagcctcggcggccagaaggagcggcccccgcagcagcagcagcagcagcagcaacagcagcagcaggcgtcggccaccggcagctcgcagccggcggcggagagcagcacccagcagcgccccggggtccccgcgggaccgcggccactggacggatacctcggagtggcggaccacaagcccctgaaaatgcactgcagggactgtgccctggtgaccagctcagggcatctgctgcacagtcggcaaggctcccagattgaccagacagagtgtgtcatccgcatgaatgacgcccccacacgcggctatgggcgtgacgcgggcaatcgcaccagcctgagggtcatcgcgcattccagcatccagaggatcctccgcaaccgccatgacctgctcaacgtgagccagggcaccgtgttcatcttctggggccccagcagctacatgcggcgggacggcaagggccaggtctacaacaacctgcatctcctgagccaggtgctgccccggctgaaggccttcatgattactcgccacaagatgctgcagtttgatgagctcttcaagcaggagactggcaaagacaggaagatatccaacacttggctcagcactggctggtttacaatgacaattgcactggagctctgtgacaggatcaatgtttatggcatggtgcccccagacttctgcagggatcccaatcacccttcagtaccttatcattattatgaaccttttggacctgatgaatgtacaatgtacctctcccatgagcgaggacgcaagggcagtcatcaccgctttatcacagagaaacgagtctttaagaactgggcacggacattcaatattcacttttttcaaccagactggaaaccagaatcacttgctataaatcatcctgagaataaacctgtgttctaaggaatgagcatgccagactgtaatcccaggtattcactgcatcagacaccgagacactgaacttcctgagccaccagacaggaaagggtagcagaaaacagcttcactcctcaggaagtaccatggacagacgcctaccaggggtgacaaagcagtgcagttggattgtaaggaaaaattccggaattaatgcatcctaatgaatgttgtccccttcaatggtgttaccttaggagctgaacattcaattcagttacaccactatgactaaaaacagtttggatctcttagtattgcctttgaaactgcaacataagcaactcaacaatattagttgcattcctttatagacataccatgtcaaagacgtttttctatcaagttgtattctttcctgttctataacctttgtcatctgttagactctgtatgtgtgatttgtaaaaagcaggctgaaactatggacatgatttctgaagagcacatctccactgactttcataaagcaaatgtccaatatttatttattgagagttttttagtgcaatctgggccagtatttttatagattatgattatgtggtaatttatccttcctaactctttaatcctgaatgatggttggaaatggcctagaattaggttactctgttcacaatgctcattgttagcatgcaattggtatttgacttggaagtgttgtgttgtattttttgaacccctaggcttcaggaaaactgctcttttgtaaaaagaatagcgatgacattttctaatgtgcagaaatgttccaaaaggacaaaattgaaaaccaaaaactatgttattaaaacaaaaaaatgct

SEQ ID NO: 29 - DNA, 2017 bp, homo sapien
agttttaattctgtctctaatctctgcaacagccgcgcttcccgggtcccgcggctcccgcgcgcgatctgccgcggccggctgctgggcaaaaatcagagccgcctccgccccattacccatcatggaaaccctccaggaaaaagtggccccggacgcgcgagcctgaggattctgcacaaaagaggtgcccaaaatgaagaccctgatgcgccatggtctggcagtgtgtttagcgctcaccaccatgtgcaccagcttgttgctagtgtacagcagcctcggcggccagaaggagcggcccccgcagcagcagcagcagctcgcagccggcggcggagagcagcacccagcagcgccccggggtccccgcgggaccgcggccactggacggatacctcggagtggcggaccacaagcccctgaaaatgtactgcagggactgtgccctggtgaccagctcagggcatctgctgcacagtcggcaaggctcccagattgaccagacagagtgtgtcgtccgcatgaatgacgcccccacacgcggctatgggcgtgacgcgggcaatcgcaccagcctgagggtcatcgcgcattccagcatccagaggatcctccgcaaccgccatgacctgctcaacgtgagccagggcaccgtgttcatcttctggggccccagcagctacatgcggcgggacggcaagggccaggtctacaacaacctgcatctcctgagccaggtgctgccccggctgaaggccttcatgattactcgccacaagatgctgcagtttgatgagctcttcaagcaggagactggcaaagacagatatccaacacttggctcagcactggctggtttacaatgacaattgcactggagctctgtgacaggatcaatgtttatggcatggtgcccccagacttctgcagggatcccaatcacccttcagtaccttatcattattatgaaccttttggacctgatgaatgtacaatgtacctctcccatgagcgaggacgcaagggcagtcatcaccgctttatcacagagaaacgagtctttaagaactgggcacggacattcaatattcacttttctcaaccagactggaaaccagaatcacttgctataaatcatcctgagaataaacctgtgttctaaggaatgagcatgccagactgtaatcccaggtattcactgcatcagacaccgagacactgaacttcctgagccaccagacaggaaagggtagcagaaaacagcttcactcctcaggaagtaccatggacagacgcctaccaggggtgacaaagcagtgcagttggattgtaaggaaaaattccggaattaatgcatcctaatgaatgttgtccccttcaatggtgttaccttaggagctgaacattcaattcagttacaccactatgactaaaaacagtttggatctcttagtattgcctttgaaactgcaacataagcaactcaacaatattagttgcattcctttatagacataccatgtcaaagacgtttttctatcaagttgtattctttcctgttctataacctttgtcatctgttagactctgtatgtgtgatttgtaaaaagcaggctgaaactatggacatgatttctgaagagcacatctccactgactttcataaagcaaatgtccaatatttatttattgagagttttttagtgcaatctgggccagtatttttatagattatgattatgtggtaatttatccttcctaactctttaatcctgaatgatggttggaaatggcctagaattaggttactctgttcacaatgctcattgttagcatgcaattggtatttgacttggaagtgttgtgttgtattttttgaacccctaggcttcagggaaactgctcttttgtaaaaagaatagcgatgacattttctaatgtgcagaaatgttccaaaaggacaaaattgaaaaccaaaaactatgttattaaaacaaaaaaatgctaacaagag

SEQ ID NO: 30 - DNA, 1291 bp, homo sapien
gtctctaatctctgcaacagccgcgcttcccgggtcccgcggctcccgcgcgcgatctgccgcggccggctgctgggcaaaaatcagagccgcctccgccccattacccatcatggaaaccctccaggaaaaagtggccccggacgcgcgagcctgaggattctgcacaaaagaggtgcccaaaatgaagaccctgatgcgccatggtctggcagtgtgtttagcgctcaccaccatgtgcaccagcttgttgctagtgtacagcagcctcggcggccagaaggagcggcggagagcagcacccagcagcgccccggggtccccgcgggaccgcggccactggacggatacctcggagtggcggaccacaagcccctgaaaatgcactgcagggactgtgccctggtgaccagctcagggcatctgctgcacagtcggcaaggctcccagattgaccagacagagtgtgtcatccgcatgaatgacgcccccacacgcggctatgggcgtgacgcgggcaatcgcaccagcctgagggtcatcgcgcattccagcatccagaggatcctccgcaaccgccatgacctgctcaacgtgagccagggcaccgtgttcatcttctggggccccagcagctacatgcggcgggacggcaagggccaggtctacaacaacctgcatctcctgagccaggtgctgccccggctgaaggccttcatgattactcgccacaagatgctgcagtttgatgagctcttcaagcaggagactggcaaagacaggaagatatccaacacttggctcagcactggctggtttacaatgacaattgcactggagctctgtgacaggatcaatgtttatggcatggtgcccccagacttctgcagggatcccaatcacccttcagtaccttatcattattatgaaccttttggacctgatgaatgtacaatgtacctctcccatgagcgaggacgcaagggcagtcatcaccgctttatcacagagaaacgagtctttaagaactgggcacggacattcaatattcacttttttcaaccagactggaaaccagaatcacttgctataaatcatcctgagaataaacctgtgttctaaggaatgagcatgccagactgtaatcccaggtattcactgcatcagacaccgagacactgaacttcctgagccaccagacaggaaagggtagcagaaaacagcttcactcctcaggaagtaccatggacagacgcctaccaggggtgacaaagcagtgcagttggattgt

SEQ ID NO: 31 - DNA, 2048 bp, homo sapien
ctctgcaacagccgcgcttcccgggtcccgcggctcccgcgcgcgatctgccgcggccggctgctgggcaaaaatcagagccgcctccgccccattacccatcatggaaaccctccaggaaaaagtggccccggacgcgcgagcctgaggattctgcacaaaagaggtgcccaaaatgaagaccctgatgcgccatggtctggcagtgtgtttagcgctcaccaccatgtgcaccagcttgttgctagtgtacagcagcctcggcggccagaaggagcggcccccgcagcagcagcagcagcagcagcaacagcagcagcaggcgtcggccaccggcagctcgcagccggcggcggagagcagcacccagcagcgccccggggtccccgcgggaccgcggccactggacggatacctcggagtggcggaccacaagcccctgaaaatgcactgcagggactgtgccctggtgaccagctcagggcatctgctgcacagtcggcaaggctcccagattgaccagacagagtgtgtcatccgcatgaatgacgcccccacacgcggctatgggcgtgacgcgggcaatcgcaccagcctgagggtcatcgcgcattccagcatccagaggatcctccgcaaccgccatgacctgctcaacgtgagccagggcaccgtgttcatcttctggggccccagcagctacatgcggcgggacggcaagggccaggtctacaacaacctgcatctcctgagccaggtgctgccccggctgaaggccttcatgattactcgccacaagatgctgcagtttgatgagctcttcaagcaggagactggcaaagacaggaagatatccaacacttggctcagcactggctggtttacaatgacaattgcactggagctctgtgacaggatcaatgtttatggcatggtgcccccagacttctgcagggatcccaatcacccttcagtaccttatcattattatgaaccttttggacctgatgaatgtacaatgtacctctcccatgagcgaggacgcaagggcagtcatcaccgctttatcacagagaaacgagtctttaagaactgggcacggacattcaatattcacttttttcaaccagactggaaaccagaatcacttgctataaatcatcctgagaataaacctgtgttctaaggaatgagcatgccagactgtaatcccaggtattcactgcatcagacaccgagacactgaacttcctgagccaccagacaggaaagggtagcagaaaacagcttcactcctcaggaagtaccatggacagacgcctaccaggggtgacaaagcagtgcagttggattgtaaggaaaaattccggaattaatgcatcctaatgaatgttgtccccttcaatggtgttaccttaggagctgaacattcaattcagttacaccactatgactaaaaacagtttggatctcttagtattgcctttgaaactgcaacataagcaactcaacaatattagttgcattcctttatagacataccatgtcaaagacgtttttctatcaagttgtattctttcctgttctataacctttgtcatctgttagactctgtatgtgtgatttgtaaaaagcaggctgaaactatggacatgatttctgaagagcacatctccactgactttcataaagcaaatgtccaatatttatttattgagagttttttagtgcaatctgggccagtatttttatagattatgattatgtggtaatttatccttcctaactctttaatcctgaatgatggttggaaatggcctagaattaggttactctgttcacaatgctcattgttagcatgcaattggtatttgacttggaagtgttgtgttgtattttttgaacccctaggcttcaggaaaactgctcttttgtaaaaagaatagcgatgacattttctaatgtgcagaaatgttccaaaaggacaaaattgaaaaccaaaaactatgttattaaaacaaaaaaatgctaaaaaaaaaaaaaaaaaa

SEQ ID NO: 32 - DNA, 1041 bp, homo sapien
gaggtgcccaaaatgaagaccctgatgcgccatggtctggcagtgtgtttagcgctcaccaccatgtgcaccagcttgttgctagtgtacagcagcctcggcggccagaaggagcggcccccgcagcagcagcagcagcagcagcaacagcagcagcaggcgtcggccaccggcagctcgcagccggcggcggagagcagcacccagcagcgccccggggtccccgcgggaccgcggccactggacggatacctcggagtggcggaccacaagcccctgaaaatgcactgcagggactgtgccctggtgaccagctcagggcatctgctgcacagtcggcaaggctcccagattgaccagacagagtgtgtcatccgcatgaatgacgcccccacacgcggctatgggcgtgacgcgggcaatcgcaccagcctgagggtcatcgcgcattccagcatccagaggatcctccgcaaccgccatgacctgctcaacgtgagccagggcaccgtgttcatcttctggggccccagcagctacatgcggcgggacggcaagggccaggtctacaacaacctgcatctcctgagccaggtgctgccccggctgaaggccttcatgattactcgccacaagatgctgcagtttgatgagctcttcaagcaggagactggcaaagacaggaagatatccaacacttggctcagcactggctggtttacaatgacaattgcactggagctctgtgacaggatcaatgtttatggcatggtgcccccagacttctgcagggatcccaatcacccttcagtaccttatcattattatgaaccttttggacctgatgaatgtacaatgtacctctcccatgagcgaggacgcaagggcagtcatcaccgctttatcacagagaaacgagtctttaagaactgggcacggacattcaatattcacttttttcaaccagactggaaaccagaatcacttgctataaatcatcctgagaataaacctgtgttctaaggaatgagcatgccagac

SEQ ID NO: 33 - DNA, 3751 bp, homo sapien
agttgtgtagatcgctgagagactacgagggtccggttcagttttaattctgtctctaatctctgcaacagccgcgcttcccgggtcccgcggctcccgcgcgcgatctgccgcggccggctgctgggcaaaaatcagagccgcctccgccccattacccatcatggaaaccctccaggaaaaagtggccccggacgcgcgagcctgaggattctgcacaaaagaggtgcccaaaatgaagaccctgatgcgccatggtctggcagtgtgtttagcgctcaccaccatgtgcaccagcttgttgctagtgtacagcagcctcggcggccagaaggagcggcccccgcagcagcagcagcagcagcagcaacagcagcagcaggcgtcggccaccggcagctcgcagccggcggcggagagcagcacccagcagcgccccggggtccccgcgggaccgcggccactggacggatacctcggagtggcggaccacaagcccctgaaaatgcactgcagggactgtgccctggtgaccagctcagggcatctgctgcacagtcggcaaggctcccagattgaccagacagagtgtgtcatccgcatgaatgacgcccccacacgcggctatgggcgtgacgcgggcaatcgcaccagcctgagggtcatcgcgcattccagcatccagaggatcctccgcaaccgccatgacctgctcaacgtgagccagggcaccgtgttcatcttctggggccccagcagctacatgcggcgggacggcaagggccaggtctacaacaacctgcatctcctgagccaggtgctgccccggctgaaggccttcatgattactcgccacaagatgctgcagtttgatgagctcttcaagcaggagactggcaaagacaggaagatatccaacacttggctcagcactggctggtttacaatgacaattgcactggagctctgtgacaggatcaatgtttatggcatggtgcccccagacttctgcagggatcccaatcacccttcagtaccttatcattattatgaaccttttggacctgatgaatgtacaatgtacctctcccatgagcgaggacgcaagggcagtcatcaccgctttatcacagagaaacgagtctttaagaactgggcacggacattcaatattcacttttttcaaccagactggaaaccagaatcacttgctataaatcatcctgagaataaacctgtgttctaaggaatgagcatgccagactgtaatcccaggtattcactgcatcagacaccgagacactgaacttcctgagccaccagacaggaaagggtagcagaaaacagcttcactcctcaggaagtaccatggacagacgcctaccaggggtgacaaagcagtgcagttggattgtaaggaaaaattccggaattaatgcatcctaatgaatgttgtccccttcaatggtgttaccttaggagctgaacattcaattcagttacaccactatgactaaaaacagtttggatctcttagtattgcctttgaaactgcaacataagcaactcaacaatattagttgcattcctttatagacataccatgtcaaagacgtttttctatcaagttgtattctttcctgttctataacctttgtcatctgttagactctgtatgtgtgatttgtaaaaagcaggctgaaactatggacatgatttctgaagagcacatctccactgactttcataaagcaaatgtccaatatttatttattgagagttttttagtgcaatctgggccagtatttttatagattatgattatgtggtaatttatccttcctaactctttaatcctgaatgatggttggaaatggcctagaattaggttactctgttcacaatgctcattgttagcatgcaattggtatttgacttggaagtgttgtgttgtattttttgaacccctaggcttcaggaaaactgctcttttgtaaaaagaatagcgatgacattttctaatgtgcagaaatgttccaaaaggacaaaattgaaaaccaaaaactatgttattaaaacaaaaaaatgctaacaagagaaatttaaaggtagttttctttagtaataatttatgtaagtgtcctctcttgagccctagtttcctttttggcagaatgatgtcactgtaccagacaacctcttaggtttcatcccaaatctaaacttgtggcctcttcttgacccatttgaagactctgcacttggagtgatggggccccaacagtagcaggaactttattttggggagccttatctacattcatattacttatatcactcttgtggttaaaactacacttcttcctgtgtccacatgggctaaaatctaccccctgcttctctcgaagcatcaccatccgcctcttccccagcctctcaacacaaaaacacaggatacacacacacacacacacacaaaagacatagctccaaggggttccctggctacaatagcaaacagctgcccttctgtgaggaaaagagactacaaggacatgccctatcattcaactcatttatgctatgaactgtttagactcactacaaatcttcttagattatattcattaccattccctggtctgaaggagtataaaggacttattttattcagagccaagataaattcatattatagatttttatttaaacaagtaatattgttcaaaaatagtctcttataaatatactagtgttttctttacacatgacttagaaggcattagtttctctaatgccaaatttgaaggcaccagcaaatattatgtatgaagactgacattgttttacagacatgacctggcttatgataaaagaagttttatcgcattaccacttcttttcccttttcttaattagtacactaactagtactattaattacacggagtattgttgttaaaatgcaaacacaatcagggtactcacataacataaacaaagttgatattgatgtgtatggcttgggctgttcaaagccagtaagattgaaatggccgtccaaaacatactggaatatgttctttaagttttctcatagtttttaaagggactatgaattttattccaacacattgtcttccacagcatggactctgaacacatcatactttatcaacatatgaaaaagtgtattaattttatacaatttacttataggccacctttataatcacttgaagacgttatgttgctcaaacataagtggctcctttggcaatttctatatttgtggaaatttggaaaggcatagtttcaacatgcaagaatgtaattatattgcttcatctaataatatctcacatatctgtctatcttcagattttagattttctttattaaaaaaaccatcatggtagctccatctcgtttgtaacttctccctctcaaatactcagaagaatgaagaggccaaattcagaaaatcatggcttcactgggaaatgttttaaatctacatgtagctaggatatgtgatttcatattttttaaaaatgtggtgtaaataagtgtaaaaaattaccacttgcaaagtggttttattacagcgttaaagaaaatgactagaattctgatagattgtgctgatgaacctggttgtgggcaattgaattcttgtcttcccactaccatttcatgactgtcgtctgaacactattcaacaccattaaatataaactctgatataaaa

SEQ ID NO: 34 - DNA, 2055 bp, homo sapien
agttttaattctgtctctaatctctgcaacagccgcgcttcccgggtcccgcggctcccgcgcgcgatctgccgcggccggctgctgggcaaaaatcagagccgcctccgccccattacccatcatggaaaccctccaggaaaaagtggccccggacgcgcgagcctgaggattctgcacaaaagaggtgcccaaaatgaagaccctgatgcgccatggtctggcagtgtgtttagcgctcaccaccatgtgcaccagcttgttgctagtgtacagcagcctcggcggccagaaggagcggcccccgcagcagcagcagcagcagcagcaacagcagcagcaggcgtcggccaccggcagctcgcagccggcggcggagagcagcacccagcagcgccccggggtccccgcgggaccgcggccactggacggatacctcggagtggcggaccacaagcccctgaaaatgcactgcagggactgtgccctggtgaccagctcagggcatctgctgcacagtcggcaaggctcccagattgaccagacagagtgtgtcatccgcatgaatgacgcccccacacgcggctatgggcgtgacgcgggcaatcgcaccagcctgagggtcatcgcgcattccagcatccagaggatcctccgcaaccgccatgacctgctcaacgtgagccagggcaccgtgttcatcttctggggccccagcagctacatgcggcgggacggcaagggccaggtctacaacaacctgcatctcctgagccaggtgctgccccggctgaaggccttcatgattactcgccacaagatgctgcagtttgatgagctcttcaagcaggagactggcaaagacagatatccaacacttggctcagcactggctggtttacaatgacaattgcactggagctctgtgacaggatcaatgtttatggcatggtgcccccagacttctgcagggatcccaatcacccttcagtaccttatcattattatgaaccttttggacctgatgaatgtacaatgtacctctcccatgagcgaggacgcaagggcagtcatcaccgctttatcacagagaaacgagtctttaagaactgggcacggacattcaatattcacttttttcaaccagactggaaaccagaatcacttgctataaatcatcctgagaataaacctgtgttctaaggaatgagcatgccagactgtaatcccaggtattcactgcatcagacaccgagacactgaacttcctgagccaccagacaggaaagggtagcagaaaacagcttcactcctcaggaagtaccatggacagacgcctaccaggggtgacaaagcagtgcagttggattgtaaggaaaaattccggaattaatgcatcctaatgaatgttgtccccttcaatggtgttaccttaggagctgaacattcaattcagttacaccactatgactaaaaacagtttggatctcttagtattgcctttgaaactgcaacataagcaactcaacaatattagttgcattcctttatagacataccatgtcaaagacgtttttctatcaagttgtattctttcctgttctataacctttgtcatctgttagactctgtatgtgtgatttgtaaaaagcaggctgaaactatggacatgatttctgaagagcacatctccactgactttcataaagcaaatgtccaatatttatttattgagagttttttagtgcaatctgggccagtatttttatagattatgattatgtggtaatttatccttcctaactctttaatcctgaatgatggttggaaatggcctagaattaggttactctgttcacaatgctcattgttagcatgcaattggtatttgacttggaagtgttgtgttgtattttttgaacccctaggcttcaggaaaactgctcttttgtaaaaagaatagcgatgacattttctaatgtgcagaaatgttccaaaaggacaaaattgaaaaccaaaaactatgttattaaaacaaaaaaatgctaacaagag

SEQ ID NO: 35 - protein, 336 aa, homo sapien
MKTLMRHGLAVCLALTTMCTSLLLVYSSLGGQKERPPQQQQQQQQQQQQASATGSSQPAAESSTQQRPGVPAGPRPLDGYLGVADHKPLKMHCRDCALVTSSGHLLHSRQGSQIDQTECVIRMNDAPTRGYGRDVGNRTSLRVIAHSSIQRILRNRHDLLNVSQGTVFIFWGPSSYMRRDGKGQVYNNLHLLSQVLPRLKAFMITRHKMLQFDELFKQETGKDRKISNTWLSTGWFTMTIALELCDRINVYGMVPPDFCRDPNHPSVPYHYYEPFGPDECTMYLSHERGRKGSHHRFITEKRVFKNWARTFNIHFFQPDWKPESLAINHPENKPVF

SEQ ID NO: 36 - protein, 146 aa, homo sapien [sequence omitted]

SEQ ID NO: 37 - protein, 246 aa, homo sapien
MHCRDCALVTSSGHLLHSRQGSQIDQTECVIRMNDAPTRGYGRDVGNRTSLRVIAHSSIQRILRNRHDLLNVSQGTVFIFWGPSSYMRRDGKGQVYNNLHLLSQVLPRLKAFMITRHKMLQFDELFKQETGKDRKISNTWLSTGWFTMTIALELCDRINVYGMVPPDFCRDPNHPSVPYHYYEPFGPDECTMYLSHERGRKGSHHRFITEKRVFKNWARTFNIHFFQPDWKPESLAINHPENKPVF

SEQ ID NO: 38 - protein, 236 aa, homo sapien
MKTLMRHGLAVCLALTTMCTSLLLVYSSLGGQKERPPQQQQQQQQQQQQASATGSSQPAAESSTQQRPGVPAGPRPLDGYLGVADHKPLKMHCRDCALVTSSGHLLHSRQGSQIDQTECVIRMNDAPTRGYGRDVGNRTSLRVIAHSSIQRILRNRHDLLNVSQGTVFIFWGPSSYMRRDGKGQVYNNLHLLSQVLPRLKAFMITRHKMLQFDELFKQETGKDRYPTLGSALAGLQ

SEQ ID NO: 39 - protein, 336 aa, homo sapien
MKTLMRHGLAVCLALTTMCTSLLLVYSSLGGQKERPPQQQQQQQQQQQQASATGSSQPAAESSTQQRPGVPAGPRPLDGYLGVADHKPLKMHCRDCALVTSSGHLLHSRQGSQIDQTECVIRMNDAPTRGYGRDAGNRTSLRVIAHSSIQRILRNRHDLLNVSQGTVFIFWGPSSYMRRDGKGQVYNNLHLLSQVLPRLKAFMITRHKMLQFDELFKQETGKDRKISNTWLSTGWFTMTIALELCDRINVYGMVPPDFCRDPNHPSVPYHYYEPFGPDECTMYLSHERGRKGSHHRFITEKRVFKNWARTFNIHFFQPDWKPESLAINHPENKPVF

SEQ ID NO: 40 - protein, 146 aa, homo sapien
MYCRDCALVTSSGHLLHSRQGSQIDQTECVVRMNDAPTRGYGRDAGNRTSLRVIAHSSIQRILRNRHDLLNVSQGTVFIFWGPSSYMRRDGKGQVYNNLHLLSQVLPRLKAFMITRHKMLQFDELFKQETGKDRYPTLGSALAGLQ

SEQ ID NO: 41 - protein, 246 aa, homo sapien
MHCRDCALVTSSGHLLHSRQGSQIDQTECVIRMNDAPTRGYGRDAGNRTSLRVIAHSSIQRILRNRHDLLNVSQGTVFIFWGPSSYMRRDGKGQVYNNLHLLSQVLPRLKAFMITRHKMLQFDELFKQETGKDRKISNTWLSTGWFTMTIALELCDRINVYGMVPPDFCRDPNHPSVPYHYYEPFGPDECTMYLSHERGRKGSHHRFITEKRVFKNWARTFNIHFFQPDWKPESLAINHPENKPVF

SEQ ID NO: 42 - protein, 236 aa, homo sapien
MKTLMRHGLAVCLALTTMCTSLLLVYSSLGGQKERPPQQQQQQQQQQQQASATGSSQPAAESSTQQRPGVPAGPRPLDGYLGVADHKPLKMHCRDCALVTSSGHLLHSRQGSQIDQTECVIRMNDAPTRGYGRDAGNRTSLRVIAHSSIQRILRNRHDLLNVSQGTVFIFWGPSSYMRRDGKGQVYNNLHLLSQVLPRLKAFMITRHKMLQFDELFKQETGKDRYPTLGSALAGLQ

SEQ ID NO: 43 - DNA, 20 bp, artificial sequence
  Synthetic sequence; gRNA Recognition Sequence
cttgtggcgagtaatcatga

SEQ ID NO: 44 - DNA, 20 bp, artificial sequence
  Synthetic sequence; gRNA Recognition Sequence
atgaatgacgcccccacacg

SEQ ID NO: 45 - DNA, 20 bp, artificial sequence
  Synthetic sequence; gRNA Recognition Sequence
ggacggatacctcggagtgg

SEQ ID NO: 46 - DNA, 20 bp, artificial sequence
  Synthetic sequence; gRNA Recognition Sequence
cgcggctatgggcgtgacgt

SEQ ID NO: 47 - DNA, 20 bp, artificial sequence
  Synthetic sequence; gRNA Recognition Sequence
gtgtgggggcgtcattcatg

SEQ ID NO: 48 - DNA, 20 bp, artificial sequence
  Synthetic sequence; gRNA Recognition Sequence
gctgtacactagcaacaagc

SEQ ID NO: 49 - DNA, 20 bp, artificial sequence
  Synthetic sequence; gRNA Recognition Sequence
ggggccccagcagctacatg

SEQ ID NO: 50 - DNA, 20 bp, artificial sequence
  Synthetic sequence; gRNA Recognition Sequence
ccttgtggtccgccactccg

SEQ ID NO: 51 - DNA, 20 bp, artificial sequence
  Synthetic sequence; gRNA Recognition Sequence
cctcggagtggcggaccaca

SEQ ID NO: 52 - DNA, 20 bp, artificial sequence
  Synthetic sequence; gRNA Recognition Sequence
actccgaggtatccgtccag

SEQ ID NO: 53 - DNA, 20 bp, artificial sequence
  Synthetic sequence; gRNA Recognition Sequence
tgggcaatcgcaccagcctg

SEQ ID NO: 54 - DNA, 20 bp, artificial sequence
  Synthetic sequence; gRNA Recognition Sequence
agcagctacatgcggcggga

SEQ ID NO: 55 - DNA, 20 bp, artificial sequence
  Synthetic sequence; gRNA Recognition Sequence
aggtatccgtccagtggccg

SEQ ID NO: 56 - DNA, 20 bp, artificial sequence
  Synthetic sequence; gRNA Recognition Sequence
gtcacgcccatagccgcgtg

SEQ ID NO: 57 - DNA, 20 bp, artificial sequence
  Synthetic sequence; gRNA Recognition Sequence
cacgcccatagccgcgtgtg

SEQ ID NO: 58 - DNA, 20 bp, artificial sequence
  Synthetic sequence; gRNA Recognition Sequence
tcgcgcattccagcatccag

SEQ ID NO: 59 - DNA, 20 bp, artificial sequence
  Synthetic sequence; gRNA Recognition Sequence
acgcccatagccgcgtgtgg

SEQ ID NO: 60 - DNA, 20 bp, artificial sequence
  Synthetic sequence; gRNA Recognition Sequence
gcgggcatgctgtcaccttg

SEQ ID NO: 61 - DNA, 20 bp, artificial sequence
  Synthetic sequence; gRNA Recognition Sequence
catctgctgcacagtcggca

SEQ ID NO: 62 - DNA, 20 bp, artificial sequence
  Synthetic sequence; gRNA Recognition Sequence
cagcagcaggcgtcggccac

1. A method of treating a subject having cognitive impairment, decreased myelin integrity, neurodegeneration, decreased grey/white matter contrast (GWC), conversion of mild cognitive impairment to dementia or at risk of developing cognitive impairment, decreased myelin integrity, neurodegeneration, decreased GWC, or conversion of mild cognitive impairment to dementia, the method comprising administering an Alpha-N-Acetylgalactosaminide Alpha-2,6-Sialyltransferase 5 (ST6GALNAC5) inhibitor to the subject.

2-5. (canceled)

6. The method according to claim 1, wherein the ST6GALNAC5 inhibitor comprises an inhibitory nucleic acid molecule.

7. The method according to claim 6, wherein the inhibitory nucleic acid molecule comprises an antisense nucleic acid molecule, a small interfering RNA (siRNA), or a short hairpin RNA (shRNA) that hybridizes to an ST6GALNAC5 nucleic acid molecule.

8-14. (canceled)

15. The method according to claim 1, further comprising detecting the presence or absence of an ST6GALNAC5 missense variant nucleic acid molecule encoding an ST6GALNAC5 predicted loss-of-function polypeptide in a biological sample obtained from the subject.

16. The method according to claim 15, further comprising administering a therapeutic agent that treats or inhibits cognitive impairment in a standard dosage amount to a subject wherein the ST6GALNAC5 missense variant nucleic acid molecule is absent from the biological sample.

17. The method according to claim 15, further comprising administering a therapeutic agent that treats or inhibits cognitive impairment in a dosage amount that is the same as or less than a standard dosage amount to a subject that is heterozygous for the ST6GALNAC5 missense variant nucleic acid molecule.

18. The method according to claim 15, wherein the ST6GALNAC5 missense variant nucleic acid molecule encodes Val135Ala, Val45Ala, Val45A1a*, or Val135A1a*.

19. The method according to claim 15, wherein the ST6GALNAC5 missense variant nucleic acid molecule encodes Val135Ala, Val45Ala, Val45A1a*, or Val135A1a*.

20. The method according to claim 18, wherein the ST6GALNAC5 missense variant nucleic acid molecule is:
a genomic nucleic acid molecule having a nucleotide sequence comprising a cytosine at a position corresponding to position 176,867 according to SEQ ID NO:2;
an mRNA molecule having a nucleotide sequence comprising: a cytosine at a position corresponding to position 600 according to SEQ ID NO:11; a cytosine at a position corresponding to position 639 according to SEQ ID NO:12; a cytosine at a position corresponding to position 562 according to SEQ ID NO:13; a cytosine at a position corresponding to position 515 according to SEQ ID NO:14; a cytosine at a position corresponding to position 579 according to SEQ ID NO:15; a cytosine at a position corresponding to position 416 according to SEQ ID NO:16; a cytosine at a position corresponding to position 639 according to SEQ ID NO:17; or a cytosine at a position corresponding to position 600 according to SEQ ID NO:18; or
a cDNA molecule having a nucleotide sequence comprising: a cytosine at a position corresponding to position 600 according to SEQ ID NO:27; a cytosine at a position corresponding to position 639 according to SEQ ID NO:28; a cytosine at a position corresponding to position 562 according to SEQ ID NO:29; a cytosine at a position corresponding to position 515 according to SEQ ID NO:30; a cytosine at a position corresponding to position 579 according to SEQ ID NO:31; a cytosine at a position corresponding to position 416 according to SEQ ID NO:32; a cytosine at a position corresponding to position 639 according to SEQ ID NO:33; or a cytosine at a position corresponding to position 600 according to SEQ ID NO:34.

21-35. (canceled)

36. A method of treating a subject with a therapeutic agent that treats or prevents cognitive impairment, wherein the subject has cognitive impairment or is at risk of developing cognitive impairment, the method comprising:
determining whether the subject has an Alpha-N-Acetylgalactosaminide Alpha-2,6-Sialyltransferase 5 (ST6GALNAC5) missense variant nucleic acid molecule encoding an ST6GALNAC5 predicted loss-of-function polypeptide by:
obtaining or having obtained a biological sample from the subject; and
performing or having performed a sequence analysis on the biological sample to determine if the subject has a genotype comprising the ST6GALNAC5 missense variant nucleic acid molecule encoding the ST6GALNAC5 predicted loss-of-function polypeptide; and
administering or continuing to administer the therapeutic agent that treats or inhibits cognitive impairment in a standard dosage amount to a subject that is ST6GALNAC5 reference, and/or administering an ST6GALNAC5 inhibitor to the subject; and
administering or continuing to administer the therapeutic agent that treats or inhibits cognitive impairment in an amount that is the same as or less than a standard dosage amount to a subject that is heterozygous for the ST6GALNAC5 missense variant nucleic acid molecule, and/or administering an ST6GALNAC5 inhibitor to the subject;
wherein the presence of a genotype having the ST6GALNAC5 missense variant nucleic acid molecule encoding the ST6GALNAC5 predicted loss-of-function polypeptide indicates the subject has a reduced risk of developing cognitive impairment.

37. The method according to claim 36, wherein the subject is ST6GALNAC5 reference, and the subject is administered or continued to be administered the therapeutic agent that treats or inhibits cognitive impairment in a standard dosage amount, and is administered an ST6GALNAC5 inhibitor.

38. The method according to claim 36, wherein the subject is heterozygous for an ST6GALNAC5 missense variant nucleic acid molecule, and the subject is administered or continued to be administered the therapeutic agent that treats or inhibits cognitive impairment in an amount that is the same as or less than a standard dosage amount, and is administered an ST6GALNAC5 inhibitor.

39. The method according to claim 36, wherein the ST6GALNAC5 missense variant nucleic acid molecule encodes Val135Ala, Val45Ala, Val45A1a*, or Val135A1a*.

40. The method according to claim 36, wherein the ST6GALNAC5 missense variant nucleic acid molecule encodes Val135Ala, Val45Ala, Val45A1a*, or Val135A1a*.

41. The method according to claim 39, wherein the ST6GALNAC5 missense variant nucleic acid molecule is:
a genomic nucleic acid molecule having a nucleotide sequence comprising a cytosine at a position corresponding to position 176,867 according to SEQ ID NO:2;
an mRNA molecule having a nucleotide sequence comprising: a cytosine at a position corresponding to position 600 according to SEQ ID NO:11, a cytosine at a position corresponding to position 639 according to SEQ ID NO:12, a cytosine at a position corresponding to position 562 according to SEQ ID NO:13, a cytosine at a position corresponding to position 515 according to SEQ ID NO:14, a cytosine at a position corresponding to position 579 according to SEQ ID NO:15, a cytosine at a position corresponding to position 416 according to SEQ ID NO:16, a cytosine at a position corresponding to position 639 according to SEQ ID NO:17, or a cytosine at a position corresponding to position 600 according to SEQ ID NO:18; or
a cDNA molecule produced from an mRNA molecule, wherein the cDNA molecule has a nucleotide sequence comprising: a cytosine at a position corresponding to position 600 according to SEQ ID NO:27, a cytosine at a position corresponding to position 639 according to SEQ ID NO:28, a cytosine at a position corresponding to position 562 according to SEQ ID NO:29, a cytosine at a position corresponding to position 515 according to SEQ ID NO:30, a cytosine at a position corresponding to position 579 according to SEQ ID NO:31, a cytosine at a position corresponding to position 416 according to SEQ ID NO:32, a cytosine at a position corresponding to position 639 according to SEQ ID NO:33, or a cytosine at a position corresponding to position 600 according to SEQ ID NO:34.

42-56. (canceled)

57. The method according to claim 36, wherein the ST6GALNAC5 inhibitor comprises an inhibitory nucleic acid molecule.

58. The method according to claim 57, wherein the inhibitory nucleic acid molecule comprises an antisense nucleic acid molecule, a small interfering RNA (siRNA), or a short hairpin RNA (shRNA) that hybridizes to an ST6GALNAC5 nucleic acid molecule.

59-97. (canceled)
